(19) United States
(12) Patent Application Publication
(10) Pub. No.: US 2021/0309743 A1
(43) Pub. Date: Oct. 7, 2021

(54) ANTIBODY CONSTRUCTS FOR DLL3 AND CD3

(71) Applicant: AMGEN RESEARCH (MUNICH) GMBH, Munich (DE)

(72) Inventors: Tobias Raum, Munich (DE); Claudia Blümel, Munich (DE); Christoph Dahlhoff, Munich (DE); Patrick Hoffmann, Munich (DE); Peter Kufer, Munich (DE); Ralf Lutterbüse, Munich (DE); Elisabeth Nahrwold, Munich (DE); Jochen Pendzialek, Munich (DE)

(21) Appl. No.: 17/236,467

(22) Filed: Apr. 21, 2021

Related U.S. Application Data
(62) Division of application No. 16/868,257, filed on May 6, 2020.
Application No. 16/868,257 is a division of application No. 16/291,826, filed on Mar. 4, 2019, now Pat. No. 10,683,351.
Application No. 16/291,826 is a division of application No. 15/225,107, filed on Aug. 1, 2016, now Pat. No. 10,294,300.
(60) Provisional application No. 62/290,896, filed on Feb. 3, 2016.
(60) Provisional application No. 62/199,930, filed on Jul. 31, 2015.

(51) Int. Cl. C07K 16/28; A61K 39/00; A61K 39/395; C12N 15/63; C12N 5/07; C07K 16/18

(52) U.S. Cl. CPC C07K 16/2809; A61K 39/00113; A61K 39/39558; A61K 39/3955; C07K 16/22; C12N 15/63; C12N 5/06; C07K 16/18; C07K 16/28

(57) ABSTRACT

The present invention relates to a bispecific antibody construct comprising a first binding domain which binds to human DLL3 on the surface of a target cell and a second binding domain which binds to human CD3 on the surface of a T cell. Moreover, the invention provides a polynucleotide encoding the antibody construct, a vector comprising said polynucleotide and a host cell transformed or transfected with said polynucleotide or vector. Furthermore, the invention provides a process for the production of the antibody construct of the invention, a medical use of said antibody construct and a kit comprising said antibody construct.

[0001] The present invention relates to a bispecific antibody construct comprising a first binding domain which binds to human DLL3 on the surface of a target cell and a second binding domain which binds to human CD3 on the surface of a T cell. Moreover, the invention provides a polynucleotide encoding the antibody construct, a vector comprising said polynucleotide and a host cell transformed or transfected with said polynucleotide or vector. Furthermore, the invention provides a process for the production of the antibody construct of the invention, a medical use of said antibody construct and a kit comprising said antibody construct.

[0002] Small cell lung cancer (SCLC) is an aggressive form of lung cancer with a poor prognosis and limited therapeutic options, representing about 15% of all newly diagnosed lung cancers and equal to about 25,000 new cases in the US and 180,000 new cases worldwide per year. Survival rates have remained low for several decades, with only 5% of SCLC patients surviving five years, in a large part due to the lack of new therapies to combat this form of lung cancer. Most patients present with extensive-stage disease, while about a third of patients present with limited stage disease, defined by the presence of tumors in only one side of the chest and that fit in a single radiation field. These stages impact available therapeutic regiments, with limited stage disease treated with chemotherapy and radiation and extensive stage disease treated with chemotherapy alone. Disseminated, metastatic tumors with lymphoma-like characteristics are a hallmark of SCLC. The first known diagnosis of SCLC patients described it as a disease of the lymphatic system, not being recognized as lung cancer until 1926, which highlights some of the unique nature of SCLC tumors as compared to other solid tumors.

[0003] Patients typically respond well to the current front-line therapy, which includes etoposide and cisplatin, but invariably quickly relapse with chemoresistant disease, for which no therapeutic options are currently available. Prognosis in the relapsed refractory setting is extremely poor, with rapid disease progression and short median survival of less than six months. Furthermore, SCLC patients have high rates of comorbidities, including hypertension, cardiac disease, diabetes and paraneoplastic syndromes. These, coupled with the typically advanced age of SCLC patients, impact the ability of patients to endure harsh chemo regimens, further limiting treatment options.

[0004] A bispecific antibody modality, comprising an scFv that recognizes CD3 expressed on T cells and another scFv that recognizes a tumor-associated antigen, has shown promising efficacy in the clinic, with high response rates in hematological malignancies such as refractory B-ALL (Topp, M. S. et al. Blood, 2012. 120(26): p. 5185-5187), resulting in the approval of Blincyto. While efficacy with T cell-engaging therapies has yet to be demonstrated in a solid tumor indication, SCLC may represent a promising solid tumor indication for the CD3×tumor target bispecific antibody modality, given the disseminated nature of the disease. Therefore, a bispecific T cell engager that directs T cells against a specific tumor antigen presents a new opportunity as a new therapeutic option in the treatment of SCLC.

[0005] DLL3 was presently identified as an SCLC-specific tumor antigen by next-generation sequencing, comparing the prevalence of DLL3 mRNA in a panel of primary patient tumors and a large collection of normal tissues. The level of DLL3 expression in SCLC tumors was moderate, but highly prevalent, with approximately 90% of the tumors analyzed showing evidence of DLL3 expression by RNA-seq. In contrast to SCLC tumors, normal tissues showed very low expression of DLL3 transcript, with small levels detected in testis, optic nerve and cerebellum. Comparison of SCLC cell lines and tumors by RNA-seq showed similar expression levels, while cell surface quantitation of DLL3 expression on SCLC cell lines indicated expression levels below 5000 DLL3 per cell, with typical expression levels below 2000 DLL3/cell. Expression of DLL3 protein was confirmed by IHC, where 86% of SCLC tumors showed positive staining for DLL3, with a homogeneous and membranous staining pattern. Aside from very faint staining in cerebellum, all other normal tissues were negative for DLL3 staining.

[0006] DLL3 is a non-canonical Notch ligand, functioning in a cell autonomous manner to inhibit Notch signaling, binding to Notch in cis, thus blocking cell to cell interactions and internalization of Notch in the target cell, a hallmark of canonical Notch signaling. The primary role for DLL3 is in somitogenesis during embryonic development. Mice with DLL3 knockouts show segmental defects in the axial skeleton and cranial and neuronal development. Somitic patterning defects are also seen in humans with certain germline DLL3 mutations, resulting in a condition called spondylocostal dysostosis.

[0007] DLL3 has been proposed previously in methods to diagnose and treat glioma, in addition to SCLC, using an antibody-drug conjugate (ADC) (WO 2013/126746). Using an ADC-based approach for DLL3 may have limitations, given the low expression levels of the protein on the cell surface and the reduced performance of ADCs against targets with low expression. Furthermore, ADC molecules often demonstrate toxicity related to free warhead, likely a result of linker degradation, resulting in maximum tolerated dose limitations and potential impacts on efficacy unrelated to the target chosen for the antibody. This is less likely to be an issue for a T cell-engaging bispecific molecule, engineered to engage DLL3 and CD3 simultaneously, given the required sensitivity of T cells for their targets, and highly potent in vitro cytotoxicity has been demonstrated on cell lines expressing several hundred target proteins per cell. Additionally, the usually smaller size of a bispecific T cell engaging antibody construct relative to a normal antibody (full-length IgG) may improve tissue penetration and increase potency due to more efficient engagement of the DLL3 and CD3 targets, resulting in improved synapse formation between the T cell and target tumor cell.

[0008] SCLC remains a significant unmet medical need, and new therapeutic options are required to improve the outlook for this sizable patient population. The above discussed bispecific antibody modality is clinically validated, and as such an antibody construct targeting DLL3 and CD3 represents a promising new possibility for the treatment of SCLC and an opportunity to improve the survival of patients suffering with this indication. As there is still a need for having available further options for the treatment of tumor or cancer diseases related to the overexpression of DLL3, there are provided herewith means and methods for the solution of this problem in the form of a bispecific antibody construct with one binding domain directed to DLL3 and a second binding domain directed to CD3 on T cells.

[0009] Thus, in a first aspect, the present invention provides a bispecific antibody construct comprising a first binding domain which binds to human DLL3 on the surface of a target cell and a second binding domain which binds to human CD3 on the surface of a T cell, wherein the first binding domain binds to an epitope of DLL3 which is comprised within the region as depicted in SEQ ID NO: 260.

[0010] It must be noted that as used herein, the singular forms “a”, “an”, and “the” include plural references unless the context clearly indicates otherwise. Thus, for example, reference to “a reagent” includes one or more of such different reagents and reference to “the method” includes reference to equivalent steps and methods known to those of ordinary skill in the art that could be modified or substituted for the methods described herein.

[0011] Unless otherwise indicated, the term “at least” preceding a series of elements is to be understood to refer to every element in the series. Those skilled in the art will recognize, or be able to ascertain using no more than routine experimentation, many equivalents to the specific embodiments of the invention described herein. Such equivalents are intended to be encompassed by the present invention.

[0012] The term “and/or” wherever used herein includes the meaning of “and”, “or” and “all or any other combination of the elements connected by said term”.

[0013] The term “about” or “approximately” as used herein means within ±20%, preferably within ±15%, more preferably within ±10%, and most preferably within ±5% of a given value or range.

[0014] Throughout this specification and the claims which follow, unless the context requires otherwise, the word “comprise”, and variations such as “comprises” and “comprising”, will be understood to imply the inclusion of a stated integer or step or group of integers or steps but not the exclusion of any other integer or step or group of integer or step. When used herein the term “comprising” can be substituted with the term “containing” or “including” or sometimes when used herein with the term “having”.

[0015] When used herein “consisting of” excludes any element, step, or ingredient not specified in the claim element. When used herein, “consisting essentially of” does not exclude materials or steps that do not materially affect the basic and novel characteristics of the claim.

[0016] In each instance herein any of the terms “comprising”, “consisting essentially of” and “consisting of” may be replaced with either of the other two terms.

[0017] The term “antibody construct” refers to a molecule in which the structure and/or function is/are based on the structure and/or function of an antibody, e.g., of a full-length or whole immunoglobulin molecule. An antibody construct is hence capable of binding to its specific target or antigen. Furthermore, an antibody construct according to the invention comprises the minimum structural requirements of an antibody which allow for the target binding. This minimum requirement may e.g. be defined by the presence of at least the three light chain CDRs (i.e. CDR1, CDR2 and CDR3 of the VL region) and/or the three heavy chain CDRs (i.e. CDR1, CDR2 and CDR3 of the VH region), preferably of all six CDRs. The antibodies on which the constructs according to the invention are based include for example monoclonal, recombinant, chimeric, deimmunized, humanized and human antibodies.

[0018] Within the definition of “antibody constructs” according to the invention are full-length or whole antibodies also including camelid antibodies and other immunoglobulin antibodies generated by biotechnological or protein engineering methods or processes. These full-length antibodies may be for example monoclonal, recombinant, chimeric, deimmunized, humanized and human antibodies. Also within the definition of “antibody constructs” are fragments of full-length antibodies, such as VH, VHH, VL, (s)dAb, Fv, Fd, Fab, Fab′, F(ab′)2 or “r IgG” (“half antibody”). Antibody constructs according to the invention may also be modified fragments of antibodies, also called antibody variants, such as scFv, di-scFv or bi(s)-scFv, scFv-Fc, scFv-zipper, scFab, Fab2, Fab3, diabodies, single chain diabodies, tandem diabodies (Tandab's), tandem di-scFv, tandem tri-scFv, “minibodies” exemplified by a structure which is as follows: (VH-VL-CH3)₂, (scFv-CH3)2, ((scFv)2-CH3+CH3), ((scFv)2-CH3) or (scFv-CH3-scFv)2, multibodies such as triabodies or tetrabodies, and single domain antibodies such as nanobodies or single variable domain antibodies comprising merely one variable domain, which might be VHH, VH or VL, that specifically bind an antigen or epitope independently of other V regions or domains. Further preferred formats of the antibody constructs according to the invention are cross bodies, maxi bodies, hetero Fc constructs and mono Fc constructs. Examples for those formats will be described herein below.

[0019] A binding domain may typically comprise an antibody light chain variable region (VL) and an antibody heavy chain variable region (VH); however, it does not have to comprise both. Fd fragments, for example, have two VH regions and often retain some antigen-binding function of the intact antigen-binding domain. Additional examples for the format of antibody fragments, antibody variants or binding domains include (1) a Fab fragment, a monovalent fragment having the VL, VH, CL and CH1 domains; (2) a F(ab′)2 fragment, a bivalent fragment having two Fab fragments linked by a disulfide bridge at the hinge region; (3) an Fd fragment having the two VH and CH1 domains; (4) an Fv fragment having the VL and VH domains of a single arm of an antibody, (5) a dAb fragment (Ward et al., (1989) Nature 341:544-546), which has a VH domain; (6) an isolated complementarity determining region (CDR), and (7) a single chain Fv (scFv), the latter being preferred (for example, derived from an scFv-library). Examples for embodiments of antibody constructs according to the invention are e.g. described in WO 00/006605, WO 2005/040220, WO 2008/119567, WO 2010/037838, WO 2013/026837, WO 2013/026833, US 2014/0308285, US 2014/0302037, W O2014/144722, WO 2014/151910, and WO 2015/048272.

[0020] Furthermore, the definition of the term “antibody construct” includes monovalent, bivalent and polyvalent/multivalent constructs and, thus, monospecific constructs, specifically binding to only one antigenic structure, as well as bispecific and polyspecific/multispecific constructs, which specifically bind more than one antigenic structure, e.g. two, three or more, through distinct binding domains. Moreover, the definition of the term “antibody construct” includes molecules consisting of only one polypeptide chain as well as molecules consisting of more than one polypeptide chain, which chains can be either identical (homodimers, homotrimers or homo oligomers) or different (heterodimer, heterotrimer or heterooligomer). Examples for the above identified antibodies and variants or derivatives thereof are described inter alia in Harlow and Lane, Antibodies a laboratory manual, CSHL Press (1988) and Using Antibodies: a laboratory manual, CSHL Press (1999), Kontermann and Dübel, Antibody Engineering, Springer, 2nd ed. 2010 and Little, Recombinant Antibodies for Immunotherapy, Cambridge University Press 2009.

[0021] The antibody constructs of the present invention are preferably “in vitro generated antibody constructs”. This term refers to an antibody construct according to the above definition where all or part of the variable region (e.g., at least one CDR) is generated in a non-immune cell selection, e.g., an in vitro phage display, protein chip or any other method in which candidate sequences can be tested for their ability to bind to an antigen. This term thus preferably excludes sequences generated solely by genomic rearrangement in an immune cell in an animal. A “recombinant antibody” is an antibody made through the use of recombinant DNA technology or genetic engineering.

[0022] The term “monoclonal antibody” (mAb) or monoclonal antibody construct as used herein refers to an antibody obtained from a population of substantially homogeneous antibodies, i.e., the individual antibodies comprising the population are identical except for possible naturally occurring mutations and/or post-translation modifications (e.g., isomerizations, amidations) that may be present in minor amounts. Monoclonal antibodies are highly specific, being directed against a single antigenic site or determinant on the antigen, in contrast to conventional (polyclonal) antibody preparations which typically include different antibodies directed against different determinants (or epitopes). In addition to their specificity, the monoclonal antibodies are advantageous in that they are synthesized by the hybridoma culture, hence uncontaminated by other immunoglobulins. The modifier “monoclonal” indicates the character of the antibody as being obtained from a substantially homogeneous population of antibodies, and is not to be construed as requiring production of the antibody by any particular method.

[0023] For the preparation of monoclonal antibodies, any technique providing antibodies produced by continuous cell line cultures can be used. For example, monoclonal antibodies to be used may be made by the hybridoma method first described by Koehler et al., Nature, 256: 495 (1975), or may be made by recombinant DNA methods (see, e.g., U.S. Pat. No. 4,816,567). Examples for further techniques to produce human monoclonal antibodies include the trioma technique, the human B-cell hybridoma technique (Kozbor, Immunology Today 4 (1983), 72) and the EBV-hybridoma technique (Cole et al., Monoclonal Antibodies and Cancer Therapy, Alan R. Liss, Inc. (1985), 77-96).

[0024] Hybridomas can then be screened using standard methods, such as enzyme-linked immunosorbent assay (ELISA) and surface plasmon resonance (BIACORE™) analysis, to identify one or more hybridomas that produce an antibody that specifically binds with a specified antigen. Any form of the relevant antigen may be used as the immunogen, e.g., recombinant antigen, naturally occurring forms, any variants or fragments thereof, as well as an antigenic peptide thereof. Surface plasmon resonance as employed in the BIAcore system can be used to increase the efficiency of phage antibodies which bind to an epitope of a target antigen, such as DLL3 or CD3 epsilon (Schier, Human Antibodies Hybridomas 7 (1996), 97-105; Malmborg, J. Immunol. Methods 183 (1995), 7-13).

[0025] Another exemplary method of making monoclonal antibodies includes screening protein expression libraries, e.g., phage display or ribosome display libraries. Phage display is described, for example, in Ladner et al., U.S. Pat. No. 5,223,409; Smith (1985) Science 228:1315-1317, Clackson et al., Nature, 352: 624-628 (1991) and Marks et al., J. Mol. Biol., 222: 581-597 (1991).

[0026] In addition to the use of display libraries, the relevant antigen can be used to immunize a non-human animal, e.g., a rodent (such as a mouse, hamster, rabbit or rat). In one embodiment, the non-human animal includes at least a part of a human immunoglobulin gene. For example, it is possible to engineer mouse strains deficient in mouse antibody production with large fragments of the human Ig (immunoglobulin) loci. Using the hybridoma technology, antigen-specific monoclonal antibodies derived from the genes with the desired specificity may be produced and selected. See, e.g., XENOMOUSE™, Green et al. (1994) Nature Genetics 7:13-21, US 2003-0070185, WO 96/34096, and WO 96/33735.

[0027] A monoclonal antibody can also be obtained from a non-human animal, and then modified, e.g., humanized, deimmunized, rendered chimeric etc., using recombinant DNA techniques known in the art. Examples of modified antibody constructs include humanized variants of non-human antibodies, “affinity matured” antibodies (see, e.g. Hawkins et al. J. Mol. Biol. 254, 889-896 (1992) and Lowman et al., Biochemistry 30, 10832-10837 (1991)) and antibody mutants with altered effector function(s) (see, e.g., U.S. Pat. No. 5,648,260, Kontermann and Dübel (2010), loc. cit. and Little (2009), loc. cit.).

[0028] In immunology, affinity maturation is the process by which B cells produce antibodies with increased affinity for antigen during the course of an immune response. With repeated exposures to the same antigen, a host will produce antibodies of successively greater affinities. Like the natural prototype, the in vitro affinity maturation is based on the principles of mutation and selection. The in vitro affinity maturation has successfully been used to optimize antibodies, antibody constructs, and antibody fragments. Random mutations inside the CDRs are introduced using radiation, chemical mutagens or error-prone PCR. In addition, the genetical diversity can be increased by chain shuffling. Two or three rounds of mutation and selection using display methods like phage display usually results in antibody fragments with affinities in the low nanomolar range.

[0029] A preferred type of an amino acid substitutional varianation of the antibody constructs involves substituting one or more hypervariable region residues of a parent antibody (e. g. a humanized or human antibody). Generally, the resulting variant(s) selected for further development will have improved biological properties relative to the parent antibody from which they are generated. A convenient way for generating such substitutional variants involves affinity maturation using phage display. Briefly, several hypervariable region sites (e. g. 6-7 sites) are mutated to generate all possible amino acid substitutions at each site. The antibody variants thus generated are displayed in a monovalent fashion from filamentous phage particles as fusions to the gene III product of M13 packaged within each particle. The phage-displayed variants are then screened for their biological activity (e. g. binding affinity) as herein disclosed. In order to identify candidate hypervariable region sites for modification, alanine scanning mutagenesis can be performed to identify hypervariable region residues contributing significantly to antigen binding. Alternatively, or additionally, it may be beneficial to analyze a crystal structure of the antigen-antibody complex to identify contact points between the binding domain and, e.g., human DLL3. Such contact residues and neighbouring residues are candidates for substitution according to the techniques elaborated herein. Once such variants are generated, the panel of variants is subjected to screening as described herein and antibodies with superior properties in one or more relevant assays may be selected for further development.

[0030] The monoclonal antibodies and antibody constructs of the present invention specifically include “chimeric” antibodies (immunoglobulins) in which a portion of the heavy and/or light chain is identical with or homologous to corresponding sequences in antibodies derived from a particular species or belonging to a particular antibody class or subclass, while the remainder of the chain(s) is/are identical with or homologous to corresponding sequences in antibodies derived from another species or belonging to another antibody class or subclass, as well as fragments of such antibodies, so long as they exhibit the desired biological activity (U.S. Pat. No. 4,816,567; Morrison et al., Proc. Natl. Acad. Sci. USA, 81: 6851-6855 (1984)). Chimeric antibodies of interest herein include “primitized” antibodies comprising variable domain antigen-binding sequences derived from a non-human primate (e.g., Old World Monkey, Ape etc.) and human constant region sequences. A variety of approaches for making chimeric antibodies have been described. See e.g., Morrison et al., Proc. Natl. Acad. ScL U.S.A. 81:6851, 1985; Takeda et al., Nature 314:452, 1985, Cabilly et al., U.S. Pat. No. 4,816,567; Boss et al., U.S. Pat. No. 4,816,397; Tanaguchi et al., EP 0171496; EP 0173494; and GB 2177096.

[0031] An antibody, antibody construct, antibody fragment or antibody variant may also be modified by specific deletion of human T cell epitopes (a method called “deimmunization”) by the methods disclosed for example in WO 98/52976 or WO 00/34317. Briefly, the heavy and light chain variable domains of an antibody can be analyzed for peptides that bind to MHC class II; these peptides represent potential T cell epitopes (as defined in WO 98/52976 and WO 00/34317). For detection of potential T cell epitopes, a computer modeling approach termed “peptide threading” can be applied, and in addition a database of human MHC class II binding peptides can be searched for motifs present in the VH and VL sequences, as described in WO 98/52976 and WO 00/34317. These motifs bind to any of the 18 major MHC class II DR allotypes, and thus constitute potential T cell epitopes. Potential T cell epitopes detected can be eliminated by substituting small numbers of amino acid residues in the variable domains, or preferably, by single amino acid substitutions. Typically, conservative substitutions are made. Often, but not exclusively, an amino acid common to a position in human germline antibody sequences may be used. Human germline sequences are disclosed e.g. in Tomlinson, et al. (1992) J. Mol. Biol. 227:776-798; Cook, G. P. et al. (1995) Immunol. Today Vol. 16 (5): 237-242; and Tomlinson et al. (1995) EMBO J. 14: 14:4628-4638. The V BASE directory provides a comprehensive directory of human immunoglobulin variable region sequences (compiled by Tomlinson, L A. et al. MRC Centre for Protein Engineering, Cambridge, UK). These sequences can be used as a source of human sequence, e.g., for framework regions and CDRs. Consensus human framework regions can also be used, for example as described in U.S. Pat. No. 6,300,064.

[0032] “Humanized” antibodies, antibody constructs, variants or fragments thereof (such as Fv, Fab, Fab′, F(ab′)2 or other antigen-binding subsequences of antibodies) are antibodies or immunoglobulins of mostly human sequences, which contain (a) minimal sequence(s) derived from non-human immunoglobulin. For the most part, humanized antibodies are human immunoglobulins (recipient antibody) in which residues from a hypervariable region (also CDR) of the recipient are replaced by residues from a hypervariable region of a non-human (e.g., rodent) species (donor antibody) such as mouse, rat, hamster or rabbit having the desired specificity, affinity, and capacity. In some instances, Fv framework region (FR) residues of the human immunoglobulin are replaced by corresponding non-human residues. Furthermore, “humanized antibodies” as used herein may also comprise residues which are found neither in the recipient antibody nor the donor antibody. These modifications are made to further refine and optimize antibody performance. The humanized antibody may also comprise at least a portion of an immunoglobulin constant region (Fc), typically that of a human immunoglobulin. For further details, see Jones et al., Nature, 321: 522-525 (1986); Reichmann et al., Nature, 332: 323-329 (1988); and Presta, Curr. Op. Struct. Biol., 2: 593-596 (1992).

[0033] Humanized antibodies or fragments thereof can be generated by replacing sequences of the Fv variable domain that are not directly involved in antigen binding with equivalent sequences from human Fv variable domains. Exemplary methods for generating humanized antibodies or fragments thereof are provided by Morrison (1985) Science 229:1202-1207; by Oi et al. (1986) BioTechniques 4:214; and by U.S. Pat. Nos. 5,585,089; 5,693,761; 5,693,762; 5,859,205; and 6,407,213. Those methods include isolating, manipulating, and expressing the nucleic acid sequences that encode all or part of immunoglobulin Fv variable domains from at least one of a heavy or light chain. Such nucleic acids may be obtained from a hybridoma producing an antibody against a predetermined target, as described above, as well as from other sources. The recombinant DNA encoding the humanized antibody molecule can then be cloned into an appropriate expression vector.

[0034] Humanized antibodies may also be produced using transgenic animals such as mice that express human heavy and light chain genes, but are incapable of expressing the endogenous mouse immunoglobulin heavy and light chain genes. Winter describes an exemplary CDR grafting method that may be used to prepare the humanized antibodies described herein (U.S. Pat. No. 5,225,539). All of the CDRs of a particular human antibody may be replaced with at least a portion of a non-human CDR, or only some of the CDRs may be replaced with non-human CDRs. It is only necessary to replace the number of CDRs required for binding of the humanized antibody to a predetermined antigen.

[0035] A humanized antibody can be optimized by the introduction of conservative substitutions, consensus sequence substitutions, germline substitutions and/or back mutations. Such altered immunoglobulin molecules can be made by any of several techniques known in the art, (e.g., Teng et al., Proc. Natl. Acad. Sci. U.S.A., 80: 7308-7312, 1983; Kozbor et al., Immunology Today, 4: 7279, 1983; Olsson et al., Meth. Enzymol., 92: 3-16, 1982, and EP 239 400).

[0036] The term “human antibody”, “human antibody construct” and “human binding domain” includes antibodies, antibody constructs and binding domains having antibody regions such as variable and constant regions or domains which correspond substantially to human germline immunoglobulin sequences known in the art, including, for example, those described by Kabat et al. (1991) (loc. cit.). The human antibodies, antibody constructs or binding domains of the invention may include amino acid residues not encoded by human germline immunoglobulin sequences (e.g., mutations introduced by random or site-specific mutagenesis in vitro or by somatic mutation in vivo), for example in the CDRs, and in particular, in CDR3. The human antibodies, antibody constructs or binding domains can have at least one, two, three, four, five, or more positions replaced with an amino acid residue that is not encoded by the human germline immunoglobulin sequence. The definition of human antibodies, antibody constructs and binding domains as used herein also contemplates fully human antibodies, which include only non-artificially and/or genetically altered human sequences of antibodies as those can be derived by using technologies or systems such as the Xenomouse.

[0037] In some embodiments, the antibody constructs of the invention are “isolated” or “substantially pure” antibody constructs. “Isolated” or “substantially pure”, when used to describe the antibody constructs disclosed herein, means an antibody construct that has been identified, separated and/or recovered from a component of its production environment. Preferably, the antibody construct is free or substantially free of association with all other components from its production environment. Contaminant components of its production environment, such as that resulting from recombinant transfected cells, are materials that would typically interfere with diagnostic or therapeutic uses for the polypeptide, and may include enzymes, hormones, and other proteinaceous or non-proteinaceous solutes. The antibody constructs may e.g constitute at least about 5%, or at least about 50% by weight of the total protein in a given sample. It is understood that the isolated protein may constitute from 5% to 99.9% by weight of the total protein content, depending on the circumstances. The polypeptide may be made at a significantly higher concentration through the use of an inducible promoter or high expression promoter, such that it is made at increased concentration levels. The definition includes the production of an antibody construct in a wide variety of organisms and/or host cells that are known in the art. In preferred embodiments, the antibody construct will be purified (1) to a degree sufficient to obtain at least 15 residues of N-terminal or internal amino acid sequence by use of a spinning cup sequenator, or (2) to homogeneity by SDS-PAGE under non-reducing or reducing conditions using Coomassie blue or, preferably, silver stain. Ordinarily, however, an isolated antibody construct will be prepared by at least one purification step.

[0038] The term “binding domain” characterizes in connection with the present invention a domain which (specifically) binds to/interacts with/recognizes a given target epitope or a given target site on the target molecules (antigens), here: DLL3 and CD3, respectively. The structure and function of the first binding domain (recognizing DLL3), and preferably also the structure and/or function of the second binding domain (recognizing CD3), is/are based on the structure and/or function of an antibody, e.g. of a full-length or whole immunoglobulin molecule. According to the invention, the first binding domain is characterized by the presence of three light chain CDRs (i.e. CDR1, CDR2 and CDR3 of the VL region) and/or three heavy chain CDRs (i.e. CDR1, CDR2 and CDR3 of the VH region). The second binding domain preferably also comprises the minimum structural requirements of an antibody which allow for the target binding. More preferably, the second binding domain comprises at least three light chain CDRs (i.e. CDR1, CDR2 and CDR3 of the VL region) and/or three heavy chain CDRs (i.e. CDR1, CDR2 and CDR3 of the VH region). It is envisaged that the first and/or second binding domain is produced by or obtainable by phage-display or library screening methods rather than by grafting CDR sequences from a pre-existing (monoclonal) antibody into a scaffold.

[0039] According to the present invention, binding domains are in the form of one or more polypeptides. Such polypeptides may include proteinaceous parts and non-proteinaceous parts (e.g. chemical linkers or chemical cross-linking agents such as glutaraldehyde). Proteins (including fragments thereof, preferably biologically active fragments, and peptides, usually having less than 30 amino acids) comprise two or more amino acids coupled to each other via a covalent peptide bond (resulting in a chain of amino acids). The term “polypeptide” as used herein describes a group of molecules, which usually consist of more than 30 amino acids. Polypeptides may further form multimers such as dimers, trimers and higher oligomers, i.e., consisting of more than one polypeptide molecule. Polypeptide molecules forming such dimers, trimers etc. may be identical or non-identical. The corresponding higher order structures of such multimers are, consequently, termed homo- or heterodimers, homo- or heterotrimers etc. An example for a hereteromultimer is an antibody molecule, which, in its naturally occurring form, consists of two identical light polypeptide chains and two identical heavy polypeptide chains. The terms “peptide”, “polypeptide” and “protein” also refer to naturally modified peptides/polypeptides/proteins wherein the modification is effected e.g. by post-translational modifications like glycosylation, acetylation, phosphorylation and the like. A “peptide”, “polypeptide” or “protein” when referred to herein may also be chemically modified such as pegylated. Such modifications are well known in the art and described herein below.

[0040] Preferably the binding domain which binds to DLL3 and/or the binding domain which binds to CD3 is/are human binding domains. Antibodies and antibody constructs comprising at least one human binding domain avoid some of the problems associated with antibodies or antibody constructs that possess non-human such as rodent (e.g. murine, rat, hamster or rabbit) variable and/or constant regions. The presence of such rodent derived proteins can lead to the rapid clearance of the antibodies or antibody constructs or can lead to the generation of an immune response against the antibody or antibody construct by a patient. In order to avoid the use of rodent derived antibodies or antibody constructs, human or fully human antibodies/antibody constructs can be generated through the introduction of human antibody function into a rodent so that the rodent produces fully human antibodies.

[0041] The ability to clone and reconstruct megabase-sized human loci in YACs and to introduce them into the mouse germline provides a powerful approach to elucidating the functional components of very large or crudely mapped loci as well as generating useful models of human disease. Furthermore, the use of such technology for substitution of mouse loci with their human equivalents could provide unique insights into the expression and regulation of human gene products during development, their communication with other systems, and their involvement in disease induction and progression.

[0042] An important practical application of such a strategy is the “humanization” of the mouse humoral immune system. Introduction of human immunoglobulin (Ig) loci into mice in which the endogenous Ig genes have been inactivated offers the opportunity to study the mechanisms underlying programmed expression and assembly of antibodies as well as their role in B-cell development. Furthermore, such a strategy could provide an ideal source for production of fully human monoclonal antibodies (mAbs)—an important milestone towards fulfilling the promise of antibody therapy in human disease. Fully human antibodies or antibody constructs are expected to minimize the immunogenic and allergic responses intrinsic to mouse or mouse-derivatized mAbs and thus to increase the efficacy and safety of the administered antibodies/antibody constructs. The use of fully human antibodies or antibody constructs can be expected to provide a substantial advantage in the treatment of chronic and recurring human diseases, such as inflammation, autoimmunity, and cancer, which require repeated compound administrations.

[0043] One approach towards this goal was to engineer mouse strains deficient in mouse antibody production with large fragments of the human Ig loci in anticipation that such mice would produce a large repertoire of human antibodies in the absence of mouse antibodies. Large human Ig fragments would preserve the large variable gene diversity as well as the proper regulation of antibody production and expression. By exploiting the mouse machinery for antibody diversification and selection and the lack of immunological tolerance to human proteins, the reproduced human antibody repertoire in these mouse strains should yield high affinity antibodies against any antigen of interest, including human antigens. Using the hybridoma technology, antigen-specific human mAbs with the desired specificity could be readily produced and selected. This general strategy was demonstrated in connection with the generation of the first XenoMouse mouse strains (see Green et al. Nature Genetics 7:13-21 (1994)). The XenoMouse strains were engineered with yeast artificial chromosomes (YACs) containing 245 kb and 190 kb-sized germline configuration fragments of the human heavy chain locus and kappa light chain locus, respectively, which contained core variable and constant region sequences. The human Ig containing YACs proved to be compatible with the mouse system for both rearrangement and expression of antibodies and were capable of substituting for the inactivated mouse Ig genes. This was demonstrated by their ability to induce B cell development, to produce an adult-like human repertoire of fully human antibodies, and to generate antigen-specific human mAbs. These results also suggested that introduction of larger portions of the human Ig loci containing greater numbers of V genes, additional regulatory elements, and human Ig constant regions might recapitulate substantially the full repertoire that is characteristic of the human humoral response to infection and immunization. The work of Green et al. was recently extended to the introduction of greater than approximately 80% of the human antibody repertoire through introduction of megabase sized, germline configuration YAC fragments of the human heavy chain loci and kappa light chain loci, respectively. See Mendez et al. Nature Genetics 15:146-156 (1997) and U.S. patent application Ser. No. 08/759,620.

[0044] The production of the XenoMouse mice is further discussed and delineated in U.S. patent application Ser. No. 07/466,008, Ser. No. 07/610,515, Ser. No. 07/919,297, Ser. No. 07/922,649, Ser. No. 08/031,801, Ser. No. 08/112,848, Ser. No. 08/234,145, Ser. No. 08/376,279, Ser. No. 08/430,938, Ser. No. 08/464,584, Ser. No. 08/464,582, Ser. No. 08/463,191, Ser. No. 08/462,837, Ser. No. 08/486,853, Ser. No. 08/486,857, Ser. No. 08/486,859, Ser. No. 08/462,513, Ser. No. 08/724,752, and Ser. No. 08/759,620; and U.S. Pat. Nos. 6,162,963; 6,150,584; 6,114,598; 6,075,181, and 5,939,598 and Japanese Patent Nos. 3 068 180 B2, 3 068 506 B2, and 3 068 507 B2. See also Mendez et al. Nature Genetics 15:146-156 (1997) and Green and Jakobovits J. Exp. Med. 188:483-495 (1998), EP 0 463 151 B1, WO 94/02602, WO 96/34096, WO 98/24893, WO 00/76310, and WO 03/47336.

[0045] In an alternative approach, others, including GenPharm International, Inc., have utilized a “minilocus” approach. In the minilocus approach, an exogenous Ig locus is mimicked through the inclusion of pieces (individual genes) from the Ig locus. Thus, one or more VH genes, one or more DH genes, one or more JH genes, a mu constant region, and a second constant region (preferably a gamma constant region) are formed into a construct for insertion into an animal. This approach is described in U.S. Pat. No. 5,545,807 to Surani et al. and U.S. Pat. Nos. 5,545,806; 5,625,825; 5,625,126; 5,633,425; 5,661,016; 5,770,429; 5,789,650; 5,814,318; 5,877,397; 5,874,299; and 6,255,458 each to Lonberg and Kay, U.S. Pat. Nos. 5,591,669 and 6,023,010 to Krimpenfort and Berns, U.S. Pat. Nos. 5,612,205; 5,721,367; and U.S. Pat. No. 5,789,215 to Berns et al., and U.S. Pat. No. 5,643,763 to Choi and Dunn, and GenPharm International U.S. patent application Ser. No. 07/574,748, Ser. No. 07/575,962, Ser. No. 07/810,279, Ser. No. 07/853,408, Ser. No. 07/904,068, Ser. No. 07/990,860, Ser. No. 08/053,131, Ser. No. 08/096,762, Ser. No. 08/155,301, Ser. No. 08/161,739, Ser. No. 08/165,699, Ser. No. 08/209,741. See also EP 0 546 073 B1, WO 92/03918, WO 92/22645, WO 92/22647, WO 92/22670, WO 93/12227, WO 94/00569, WO 94/25585, WO 96/14436, WO 97/13852, and WO 98/24884 and U.S. Pat. No. 5,981,175. See further Taylor et al. (1992), Chen et al. (1993), Tuaillon et al. (1993), Choi et al. (1993), Lonberg et al. (1994), Taylor et al. (1994), and Tuaillon et al. (1995), Fishwild et al. (1996).

[0046] Kirin has also demonstrated the generation of human antibodies from mice in which, through microcell fusion, large pieces of chromosomes, or entire chromosomes, have been introduced. See European Patent Application Nos. 773 288 and 843 961. Xenerex Biosciences is developing a technology for the potential generation of human antibodies. In this technology, SCID mice are reconstituted with human lymphatic cells, e.g., B and/or T cells. Mice are then immunized with an antigen and can generate an immune response against the antigen. See U.S. Pat. Nos. 5,476,996; 5,698,767; and 5,958,765.

[0047] Human anti-mouse antibody (HAMA) responses have led the industry to prepare chimeric or otherwise humanized antibodies. It is however expected that certain human anti-chimeric antibody (HACA) responses will be observed, particularly in chronic or multi-dose utilizations of the antibody. Thus, it would be desirable to provide antibody constructs comprising a human binding domain against DLL3 and/or a human binding domain against CD3 in order to vitiate concerns and/or effects of HAMA or HACA response.

[0048] The terms “(specifically) binds to”, (specifically) recognizes”, “is (specifically) directed to”, and “(specifically) reacts with” mean in accordance with this invention that a binding domain interacts or specifically interacts with a given epitope or a given target site on the target molecules (antigens), here: DLL3 and CD3, respectively.

[0049] The term “epitope” refers to a site on an antigen to which a binding domain, an antibody or immunoglobulin, or a derivative, fragment or variant of an antibody or an immunoglobulin, specifically binds. An “epitope” is antigenic and thus the term epitope is sometimes also referred to herein as “antigenic structure” or “antigenic determinant”. Thus, the binding domain is an “antigen interaction site”. Said binding/interaction is also understood to define a “specific recognition”.

[0050] “Epitopes” can be formed both by contiguous amino acids or non-contiguous amino acids juxtaposed by tertiary folding of a protein. A “linear epitope” is an epitope where an amino acid primary sequence comprises the recognized epitope. A linear epitope typically includes at least 3 or at least 4, and more usually, at least 5 or at least 6 or at least 7, for example, about 8 to about 10 amino acids in a unique sequence.

[0051] A “conformational epitope”, in contrast to a linear epitope, is an epitope wherein the primary sequence of the amino acids comprising the epitope is not the sole defining component of the epitope recognized (e.g., an epitope wherein the primary sequence of amino acids is not necessarily recognized by the binding domain). Typically a conformational epitope comprises an increased number of amino acids relative to a linear epitope. With regard to recognition of conformational epitopes, the binding domain recognizes a three-dimensional structure of the antigen, preferably a peptide or protein or fragment thereof (in the context of the present invention, the antigenic structure for the first binding domain is comprised within the DLL3 protein). For example, when a protein molecule folds to form a three-dimensional structure, certain amino acids and/or the polypeptide backbone forming the conformational epitope become juxtaposed enabling the antibody to recognize the epitope. Methods of determining the conformation of epitopes include, but are not limited to, x-ray crystallography, two-dimensional nuclear magnetic resonance (2D-NMR) spectroscopy and site-directed spin labelling and electron paramagnetic resonance (EPR) spectroscopy.

[0052] A method for epitope mapping is described in the following: When a region (a contiguous amino acid stretch) in the human DLL3 protein is exchanged/replaced with its corresponding region of a non-human and non-primate DLL3 antigen (e.g., mouse DLL3, but others like chicken, rat, hamster, rabbit etc. might also be conceivable), a decrease in the binding of the binding domain is expected to occur, unless the binding domain is cross-reactive for the non-human, non-primate DLL3 used. Said decrease is preferably at least 10%, 20%, 30%, 40%, or 50%; more preferably at least 60%, 70%, or 80%, and most preferably 90%, 95% or even 100% in comparison to the binding to the respective region in the human DLL3 protein, whereby binding to the respective region in the human DLL3 protein is set to be 100%. It is envisaged that the aforementioned human DLL3/non-human DLL3 chimeras are expressed in CHO cells. It is also envisaged that the human DLL3/non-human DLL3 chimeras are fused with a transmembrane domain and/or cytoplasmic domain of a different membrane-bound protein such as EpCAM.

[0053] In an alternative or additional method for epitope mapping, several truncated versions of the human DLL3 extracellular domain can be generated in order to determine a specific region that is recognized by a binding domain. In these truncated versions, the different extracellular DLL3 domains/sub-domains or regions are stepwise deleted, starting from the N-terminus. The truncated DLL3 versions that were generated and used in the context of the present invention are depicted in FIG. 1. It is envisaged that the truncated DLL3 versions are expressed in CHO cells. It is also envisaged that the truncated DLL3 versions are fused with a transmembrane domain and/or cytoplasmic domain of a different membrane-bound protein such as EpCAM. It is also envisaged that the truncated DLL3 versions encompass a signal peptide domain at their N-terminus, for example a signal peptide derived from mouse IgG heavy chain signal peptide. It is furthermore envisaged that the truncated DLL3 versions encompass a v5 domain at their N-terminus (following the signal peptide) which allows verifying their correct expression on the cell surface. A decrease or a loss of binding is expected to occur with those truncated DLL3 versions which do not encompass any more the DLL3 region that is recognized by the binding domain. The decrease of binding is preferably at least 10%, 20%, 30%, 40%, 50%; more preferably at least 60%, 70%, 80%, and most preferably 90%, 95% or even 100%, whereby binding to the entire human DLL3 protein (or its extracellular region or domain) is set to be 100%. A method to test this loss of binding is described in Example 2.

[0054] A further method to determine the contribution of a specific residue of a target antigen to the recognition by a antibody construct or binding domain is alanine scanning (see e.g. Morrison K L & Weiss G A. Cur Opin Chem Biol. 2001 June; 5(3):302-7), where each residue to be analyzed is replaced by alanine, e.g. via site-directed mutagenesis. Alanine is used because of its non-bulky, chemically inert, methyl functional group that nevertheless mimics the secondary structure references that many of the other amino acids possess. Sometimes bulky amino acids such as valine or leucine can be used in cases where conservation of the size of mutated residues is desired. Alanine scanning is a mature technology which has been used for a long period of time.

[0055] The interaction between the binding domain and the epitope or the region comprising the epitope implies that a binding domain exhibits appreciable affinity for the epitope/the region comprising the epitope on a particular protein or antigen (here: DLL3 and CD3, respectively) and, generally, does not exhibit significant reactivity with proteins or antigens other than DLL3 or CD3. “Appreciable affinity” includes binding with an affinity of about 10⁻⁶ M (KD) or stronger. Preferably, binding is considered specific when the binding affinity is about 10⁻¹² to 10⁻⁸ M, 10⁻¹² to 10⁻⁹ M, 10⁻¹² to 10⁻¹⁰ M, 10⁻¹¹ to 10⁻⁸ M, preferably of about 10⁻¹¹ to 10⁻⁹ M. Whether a binding domain specifically reacts with or binds to a target can be tested readily by, inter alia, comparing the reaction of said binding domain with a target protein or antigen with the reaction of said binding domain with proteins or antigens other than DLL3 or CD3. Preferably, a binding domain of the invention does not essentially or substantially bind to proteins or antigens other than DLL3 or CD3 (i.e., the first binding domain is not capable of binding to proteins other than DLL3 and the second binding domain is not capable of binding to proteins other than CD3).

[0056] The term “does not essentially/substantially bind” or “is not capable of binding” means that a binding domain of the present invention does not bind a protein or antigen other than DLL3 or CD3, i.e., does not show reactivity of more than 30%, preferably not more than 20%, more preferably not more than 10%, particularly preferably not more than 9%, 8%, 7%, 6% or 5% with proteins or antigens other than DLL3 or CD3, whereby binding to DLL3 or CD3, respectively, is set to be 100%.

[0057] It is also envisaged that the antibody constructs of the present invention bind to a human DLL3 isoform having one or both of the following DLL3 point mutations: F172C and L218P. See Example 5.

[0058] Specific binding is believed to be effected by specific motifs in the amino acid sequence of the binding domain and the antigen. Thus, binding is achieved as a result of their primary, secondary and/or tertiary structure as well as the result of secondary modifications of said structures. The specific interaction of the antigen-interaction-site with its specific antigen may result in a simple binding of said site to the antigen. Moreover, the specific interaction of the antigen-interaction-site with its specific antigen may alternatively or additionally result in the initiation of a signal, e.g. due to the induction of a change of the conformation of the antigen, an oligomerization of the antigen, etc.

[0059] The antibody constructs according to the invention bind to an epitope of DLL3 which is comprised within the region as depicted in SEQ ID NO: 260, corresponding to an amino acid stretch encompassing the regions EGF-3 and EGF-4. Other groups of anti-DLL3 binders were also generated and their DLL3 binding specificities were identified during epitope mapping (see Example 2).

[0060] The largest group of generated binders recognized an epitope within the DSL domain. However, none of those antibody constructs fulfilled the criteria for sufficient cytotoxic activity in an initial 18-hour ⁵¹Cr-based cytotoxicity assay with stimulated human CD8+ T cells as effector cells and hu DLL3 transfected CHO cells as target cells.

[0061] In a further initial 48 hour FACS-based cytotoxicity assay (using unstimulated human PBMC as effector cells and hu DLL3 transfected CHO cells as target cells), those binders that recognized a DLL3 epitope within the N-terminus of the protein had EC50 values between 1455 and 1580 pM. In the present context, these values are not considered adequate for bispecific antibodies that are provided for a therapeutic use in directing a patient's immune system, more specifically the T cells' cytotoxic activity, against cancer cells.

[0062] Finally, another group of binders was generated and characterized for its cytotoxic activity in a variety of assays. The epitope mapping of these binders revealed a specificity for a DLL3 epitope comprised within the EGF-5 region, and to some extend also within the EGF-6 region (for details, see Example 2). An overall view of the data generated in the different cytotoxicity assays (see Examples 8.3, 8.5, 8.6 and 8.7) for these binders denominated DLL3-18, DLL3-19, DLL3-20 and DLL3-21 revealed the following: While not all of the binders fail in all of the assays in terms of favorable EC50 values, the entire group clearly underperforms if compared with the antibody constructs according to the invention. This observation is highlighted with a darker shadowing of the results shown in Tables 6-9.

[0063] In summary, it can clearly be stated that the antibody constructs according to the invention (which bind to an epitope of DLL3 comprised within the region as depicted in SEQ ID NO: 260) show by far the best activity performance compared to a variety of other groups of DLL3 binders having different epitope specificities. In other words, the antibody constructs according to the invention present with a favorable epitope-activity relationship, hence supporting potent bispecific antibody construct mediated cytotoxic activity.

[0064] In another aspect, the present invention provides a bispecific antibody construct comprising a first binding domain which binds to human DLL3 on the surface of a target cell and a second binding domain which binds to human CD3 on the surface of a T cell, wherein the first binding domain binds to an epitope of DLL3 which is comprised within the region as depicted in SEQ ID NO: 258.

[0065] Preferably, the first binding domain of the bispecific antibody construct of the invention comprises a VH region comprising CDR-H1, CDR-H2 and CDR-H3 and a VL region comprising CDR-L1, CDR-L2 and CDR-L3 selected from the group consisting of:

[0066] a) CDR-H1 as depicted in SEQ ID NO: 31, CDR-H2 as depicted in SEQ ID NO: 32, CDR-H3 as depicted in SEQ ID NO: 33, CDR-L1 as depicted in SEQ ID NO: 34, CDR-L2 as depicted in SEQ ID NO: 35 and CDR-L3 as depicted in SEQ ID NO: 36;

[0067] b) CDR-H1 as depicted in SEQ ID NO: 41, CDR-H2 as depicted in SEQ ID NO: 42, CDR-H3 as depicted in SEQ ID NO: 43, CDR-L1 as depicted in SEQ ID NO: 44, CDR-L2 as depicted in SEQ ID NO: 45 and CDR-L3 as depicted in SEQ ID NO: 46;

[0068] c) CDR-H1 as depicted in SEQ ID NO: 51, CDR-H2 as depicted in SEQ ID NO: 52, CDR-H3 as depicted in SEQ ID NO: 53, CDR-L1 as depicted in SEQ ID NO: 54, CDR-L2 as depicted in SEQ ID NO: 55 and CDR-L3 as depicted in SEQ ID NO: 56;

[0069] d) CDR-H1 as depicted in SEQ ID NO: 61, CDR-H2 as depicted in SEQ ID NO: 62, CDR-H3 as depicted in SEQ ID NO: 63, CDR-L1 as depicted in SEQ ID NO: 64, CDR-L2 as depicted in SEQ ID NO: 65 and CDR-L3 as depicted in SEQ ID NO: 66;

[0070] e) CDR-H1 as depicted in SEQ ID NO: 71, CDR-H2 as depicted in SEQ ID NO: 72, CDR-H3 as depicted in SEQ ID NO: 73, CDR-L1 as depicted in SEQ ID NO: 74, CDR-L2 as depicted in SEQ ID NO: 75 and CDR-L3 as depicted in SEQ ID NO: 76;

[0071] f) CDR-H1 as depicted in SEQ ID NO: 81, CDR-H2 as depicted in SEQ ID NO: 82, CDR-H3 as depicted in SEQ ID NO: 83, CDR-L1 as depicted in SEQ ID NO: 84, CDR-L2 as depicted in SEQ ID NO: 85 and CDR-L3 as depicted in SEQ ID NO: 86;

[0072] g) CDR-H1 as depicted in SEQ ID NO: 91, CDR-H2 as depicted in SEQ ID NO: 92, CDR-H3 as depicted in SEQ ID NO: 93, CDR-L1 as depicted in SEQ ID NO: 94, CDR-L2 as depicted in SEQ ID NO: 95 and CDR-L3 as depicted in SEQ ID NO: 96;

[0073] h) CDR-H1 as depicted in SEQ ID NO: 101, CDR-H2 as depicted in SEQ ID NO: 102, CDR-H3 as depicted in SEQ ID NO: 103, CDR-L1 as depicted in SEQ ID NO: 104, CDR-L2 as depicted in SEQ ID NO: 105 and CDR-L3 as depicted in SEQ ID NO: 106; and

[0074] i) CDR-H1 as depicted in SEQ ID NO: 111, CDR-H2 as depicted in SEQ ID NO: 112, CDR-H3 as depicted in SEQ ID NO: 113, CDR-L1 as depicted in SEQ ID NO: 114, CDR-L2 as depicted in SEQ ID NO: 115 and CDR-L3 as depicted in SEQ ID NO: 116.

[0075] The term “variable” refers to the portions of the antibody or immunoglobulin domains that exhibit variability in their sequence and that are involved in determining the specificity and binding affinity of a particular antibody (i.e., the “variable domain(s)”). The pairing of a variable heavy chain (VH) and a variable light chain (VL) together forms a single antigen-binding site.

[0076] Variability is not evenly distributed throughout the variable domains of antibodies; it is concentrated in sub-domains of each of the heavy and light chain variable regions. These sub-domains are called “hypervariable regions” or “complementarity determining regions” (CDRs). The more conserved (i.e., non-hypervariable) portions of the variable domains are called the “framework” regions (FRM or FR) and provide a scaffold for the six CDRs in three dimensional space to form an antigen-binding surface. The variable domains of naturally occurring heavy and light chains each comprise four FRM regions (FR1, FR2, FR3, and FR4), largely adopting a β-sheet configuration, connected by three hypervariable regions, which form loops connecting, and in some cases forming part of, the β-sheet structure. The hypervariable regions in each chain are held together in close proximity by the FRM and, with the hypervariable regions from the other chain, contribute to the formation of the antigen-binding site (see Kabat et al., loc. cit.).

[0077] The terms “CDR”, and its plural “CDRs”, refer to the complementarity determining region of which three make up the binding character of a light chain variable region (CDR-L1, CDR-L2 and CDR-L3) and three make up the binding character of a heavy chain variable region (CDR-H1, CDR-H2 and CDR-H3). CDRs contain most of the residues responsible for specific interactions of the antibody with the antigen and hence contribute to the functional activity of an antibody molecule: they are the main determinants of antigen specificity.

[0078] The exact definitional CDR boundaries and lengths are subject to different classification and numbering systems. CDRs may therefore be referred to by Kabat, Chothia, contact or any other boundary definitions, including the numbering system described herein. Despite differing boundaries, each of these systems has some degree of overlap in what constitutes the so called “hypervariable regions” within the variable sequences. CDR definitions according to these systems may therefore differ in length and boundary areas with respect to the adjacent framework region. See for example Kabat (an approach based on cross-species sequence variability), Chothia (an approach based on crystallographic studies of antigen-antibody complexes), and/or MacCallum (Kabat et al., loc. cit.; Chothia et al., J. Mol. Biol, 1987, 196: 901-917; and MacCallum et al., J. Mol. Biol, 1996, 262: 732). Still another standard for characterizing the antigen binding site is the AbM definition used by Oxford Molecular's AbM antibody modeling software. See, e.g., Protein Sequence and Structure Analysis of Antibody Variable Domains. In: Antibody Engineering Lab Manual (Ed.: Duebel, S. and Kontermann, R., Springer-Verlag, Heidelberg). To the extent that two residue identification techniques define regions of overlapping, but not identical regions, they can be combined to define a hybrid CDR. However, the numbering in accordance with the so-called Kabat system is preferred.

[0079] Typically, CDRs form a loop structure that can be classified as a canonical structure. The term “canonical structure” refers to the main chain conformation that is adopted by the antigen binding (CDR) loops. From comparative structural studies, it has been found that five of the six antigen binding loops have only a limited repertoire of available conformations. Each canonical structure can be characterized by the torsion angles of the polypeptide backbone. Correspondent loops between antibodies may, therefore, have very similar three dimensional structures, despite high amino acid sequence variability in most parts of the loops (Chothia and Lesk, J. Mol. Biol., 1987, 196: 901; Chothia et al., Nature, 1989, 342: 877; Martin and Thornton, J. Mol. Biol, 1996, 263: 800). Furthermore, there is a relationship between the adopted loop structure and the amino acid sequences surrounding it. The conformation of a particular canonical class is determined by the length of the loop and the amino acid residues residing at key positions within the loop, as well as within the conserved framework (i.e., outside of the loop). Assignment to a particular canonical class can therefore be made based on the presence of these key amino acid residues.

[0080] The term “canonical structure” may also include considerations as to the linear sequence of the antibody, for example, as catalogued by Kabat (Kabat et al., loc. cit.). The Kabat numbering scheme (system) is a widely adopted standard for numbering the amino acid residues of an antibody variable domain in a consistent manner and is the preferred scheme applied in the present invention as also mentioned elsewhere herein. Additional structural considerations can also be used to determine the canonical structure of an antibody. For example, those differences not fully reflected by Kabat numbering can be described by the numbering system of Chothia et al. and/or revealed by other techniques, for example, crystallography and two- or three-dimensional computational modeling. Accordingly, a given antibody sequence may be placed into a canonical class which allows for, among other things, identifying appropriate chassis sequences (e.g., based on a desire to include a variety of canonical structures in a library). Kabat numbering of antibody amino acid sequences and structural considerations as described by Chothia et al., loc. cit. and their implications for construing canonical aspects of antibody structure, are described in the literature. The subunit structures and three-dimensional configurations of different classes of immunoglobulins are well known in the art. For a review of the antibody structure, see Antibodies: A Laboratory Manual, Cold Spring Harbor Laboratory, eds. Harlow et al., 1988.

[0081] The CDR3 of the light chain and, particularly, the CDR3 of the heavy chain may constitute the most important determinants in antigen binding within the light and heavy chain variable regions. In some antibody constructs, the heavy chain CDR3 appears to constitute the major area of contact between the antigen and the antibody. In vitro selection schemes in which CDR3 alone is varied can be used to vary the binding properties of an antibody or determine which residues contribute to the binding of an antigen. Hence, CDR3 is typically the greatest source of molecular diversity within the antibody-binding site. H3, for example, can be as short as two amino acid residues or greater than 26 amino acids.

[0082] In a classical full-length antibody or immunoglobulin, each light (L) chain is linked to a heavy (H) chain by one covalent disulfide bond, while the two H chains are linked to each other by one or more disulfide bonds depending on the H chain isotype. The CH domain most proximal to VH is usually designated as CH1. The constant (“C”) domains are not directly involved in antigen binding, but exhibit various effector functions, such as antibody-dependent, cell-mediated cytotoxicity and complement activation. The Fc region of an antibody is comprised within the heavy chain constant domains and is for example able to interact with cell surface located Fc receptors.

[0083] The sequence of antibody genes after assembly and somatic mutation is highly varied, and these varied genes are estimated to encode 10¹⁰ different antibody molecules (Immunoglobulin Genes, 2nd ed., eds. Jonio et al., Academic Press, San Diego, Calif., 1995). Accordingly, the immune system provides a repertoire of immunoglobulins. The term “repertoire” refers to at least one nucleotide sequence derived wholly or partially from at least one sequence encoding at least one immunoglobulin. The sequence(s) may be generated by rearrangement in vivo of the V, D, and J segments of heavy chains, and the V and J segments of light chains. Alternatively, the sequence(s) can be generated from a cell in response to which rearrangement occurs, e.g., in vitro stimulation. Alternatively, part or all of the sequence(s) may be obtained by DNA splicing, nucleotide synthesis, mutagenesis, and other methods, see, e.g., U.S. Pat. No. 5,565,332. A repertoire may include only one sequence or may include a plurality of sequences, including ones in a genetically diverse collection.

[0084] A preferred antibody construct according to the invention can also be defined as a bispecific antibody construct comprising a first (preferably human) binding domain which binds to human DLL3 on the surface of a target cell and a second binding domain which binds to human CD3 on the surface of a T cell, wherein the first binding domain binds to the same epitope of DLL3 as an antibody selected from the group consisting of DLL3-4, DLL3-5, DLL3-6, DLL3-7, DLL3-8, DLL3-9, and DLL3-10, i.e., an antibody comprising a VH region comprising CDR-H1, CDR-H2 and CDR-H3 and a VL region comprising CDR-L1, CDR-L2 and CDR-L3 selected from the group consisting of:

[0085] a) CDR-H1 as depicted in SEQ ID NO: 31, CDR-H2 as depicted in SEQ ID NO: 32, CDR-H3 as depicted in SEQ ID NO: 33, CDR-L1 as depicted in SEQ ID NO: 34, CDR-L2 as depicted in SEQ ID NO: 35 and CDR-L3 as depicted in SEQ ID NO: 36;

[0086] b) CDR-H1 as depicted in SEQ ID NO: 41, CDR-H2 as depicted in SEQ ID NO: 42, CDR-H3 as depicted in SEQ ID NO: 43, CDR-L1 as depicted in SEQ ID NO: 44, CDR-L2 as depicted in SEQ ID NO: 45 and CDR-L3 as depicted in SEQ ID NO: 46;

[0087] c) CDR-H1 as depicted in SEQ ID NO: 51, CDR-H2 as depicted in SEQ ID NO: 52, CDR-H3 as depicted in SEQ ID NO: 53, CDR-L1 as depicted in SEQ ID NO: 54, CDR-L2 as depicted in SEQ ID NO: 55 and CDR-L3 as depicted in SEQ ID NO: 56;

[0088] d) CDR-H1 as depicted in SEQ ID NO: 61, CDR-H2 as depicted in SEQ ID NO: 62, CDR-H3 as depicted in SEQ ID NO: 63, CDR-L1 as depicted in SEQ ID NO: 64, CDR-L2 as depicted in SEQ ID NO: 65 and CDR-L3 as depicted in SEQ ID NO: 66;

[0089] e) CDR-H1 as depicted in SEQ ID NO: 71, CDR-H2 as depicted in SEQ ID NO: 72, CDR-H3 as depicted in SEQ ID NO: 73, CDR-L1 as depicted in SEQ ID NO: 74, CDR-L2 as depicted in SEQ ID NO: 75 and CDR-L3 as depicted in SEQ ID NO: 76;

[0090] f) CDR-H1 as depicted in SEQ ID NO: 81, CDR-H2 as depicted in SEQ ID NO: 82, CDR-H3 as depicted in SEQ ID NO: 83, CDR-L1 as depicted in SEQ ID NO: 84, CDR-L2 as depicted in SEQ ID NO: 85 and CDR-L3 as depicted in SEQ ID NO: 86; and

[0091] g) CDR-H1 as depicted in SEQ ID NO: 91, CDR-H2 as depicted in SEQ ID NO: 92, CDR-H3 as depicted in SEQ ID NO: 93, CDR-L1 as depicted in SEQ ID NO: 94, CDR-L2 as depicted in SEQ ID NO: 95 and CDR-L3 as depicted in SEQ ID NO: 96.

[0092] Whether or not an antibody construct binds to the same epitope of DLL3 as another given antibody construct can be measured e.g. by epitope mapping with chimeric or truncated target molecules, e.g. as described herein above and in Example 2.

[0093] A preferred antibody construct according to the invention can also be defined as a bispecific antibody construct comprising a first (preferably human) binding domain which binds to human DLL3 on the surface of a target cell and a second binding domain which binds to human CD3 on the surface of a T cell, wherein the first binding domain competes for binding with an antibody selected from the group consisting of DLL3-4, DLL3-5, DLL3-6, DLL3-7, DLL3-8, DLL3-9, and DLL3-10, i.e., an antibody comprising a VH region comprising CDR-H1, CDR-H2 and CDR-H3 and a VL region comprising CDR-L1, CDR-L2 and CDR-L3 selected from the group consisting of those described above.

[0094] Whether or not an antibody construct competes for binding with another given antibody construct can be measured in a competition assay such as a competitive ELISA or a cell-based competition assay. Avidin-coupled microparticles (beads) can also be used. Similar to an avidin-coated ELISA plate, when reacted with a biotinylated protein, each of these beads can be used as a substrate on which an assay can be performed. Antigen is coated onto a bead and then precoated with the first antibody. The second antibody is added and any additional binding is determined. Read-out occurs via flow cytometry.

[0095] In one embodiment of the invention, the first binding domain of the antibody construct of the invention comprises a VH region selected from the group consisting of those depicted in SEQ ID NO: 37, SEQ ID NO: 47, SEQ ID NO: 57, SEQ ID NO: 67, SEQ ID NO: 77, SEQ ID NO: 87, SEQ ID NO: 97, SEQ ID NO: 107, SEQ ID NO: 117, SEQ ID NO: 435 and SEQ ID NO: 529.

[0096] In a further embodiment, the first binding domain of the antibody construct of the invention comprises a VL region selected from the group consisting of those depicted in SEQ ID NO: 38, SEQ ID NO: 48, SEQ ID NO: 58, SEQ ID NO: 68, SEQ ID NO: 78, SEQ ID NO: 88, SEQ ID NO: 98, SEQ ID NO: 108, SEQ ID NO: 118, SEQ ID NO: 436 and SEQ ID NO: 530.

[0097] In another embodiment, the first binding domain of the antibody construct of the invention comprises a VH region and a VL region selected from the group consisting of pairs of a VH region and a VL region as depicted in SEQ ID NOs: 37+38; SEQ ID NOs: 47+48; SEQ ID NOs: 57+58; SEQ ID NOs: 67+68; SEQ ID NOs: 77+78; SEQ ID NOs: 87+88; SEQ ID NOs: 97+98; SEQ ID NOs: 107+108; SEQ ID NOs: 117+118; SEQ ID NOs: 435+436; and SEQ ID Nos: 529+530.

[0098] In yet a further embodiment, the first binding domain of the antibody construct of the invention comprises a polypeptide selected from the group consisting of those depicted in SEQ ID NO: 39, SEQ ID NO: 49, SEQ ID NO: 59, SEQ ID NO: 69, SEQ ID NO: 79, SEQ ID NO: 89, SEQ ID NO: 99, SEQ ID NO: 109, SEQ ID NO: 119, SEQ ID NO: 437 and SEQ ID NO: 531.

[0099] The above first binding domains (which are specified by their CDRs, VH region and VL region and combinations thereof) characterize as binding domains which bind to a DLL3 epitope comprised within the region as depicted in SEQ ID NO: 258.

[0100] The term “bispecific” as used herein refers to an antibody construct which is “at least bispecific”, i.e., it comprises at least a first binding domain and a second binding domain, wherein the first binding domain binds to one antigen or target (here: DLL3), and the second binding domain binds to another antigen or target (here: CD3). Accordingly, antibody constructs according to the invention comprise specificities for at least two different antigens or targets. The term “bispecific antibody construct” of the invention also encompasses multispecific antibody constructs such as trispecific antibody constructs, the latter ones including three binding domains, or constructs having more than three (e.g. four, five . . . ) specificities.

[0101] Given that the antibody constructs according to the invention are (at least) bispecific, they do not occur naturally and they are markedly different from naturally occurring products. A “bispecific” antibody construct or immunoglobulin is hence an artificial hybrid antibody or immunoglobulin having at least two distinct binding sites with different specificities. Bispecific antibody constructs can be produced by a variety of methods including fusion of hybridomas or linking of Fab′ fragments. See, e.g., Songsivilai & Lachmann, Clin. Exp. Immunol. 79:315-321 (1990).

[0102] The at least two binding domains and the variable domains of the antibody construct of the present invention may or may not comprise peptide linkers (spacer peptides). The term “peptide linker” comprises in accordance with the present invention an amino acid sequence by which the amino acid sequences of one (variable and/or binding) domain and another (variable and/or binding) domain of the antibody construct of the invention are linked with each other. An essential technical feature of such peptide linker is that it does not comprise any polymerization activity. Among the suitable peptide linkers are those described in U.S. Pat. Nos. 4,751,180 and 4,935,233 or WO 88/09344. The peptide linkers can also be used to attach other domains or modules or regions (such as half-life extending domains) to the antibody construct of the invention.

[0103] In the event that a linker is used, this linker is preferably of a length and sequence sufficient to ensure that each of the first and second domains can, independently from one another, retain their differential binding specificities. For peptide linkers which connect the at least two binding domains (or two variable domains) in the antibody construct of the invention, those peptide linkers are preferred which comprise only a few number of amino acid residues, e.g. 12 amino acid residues or less. Thus, peptide linkers of 12, 11, 10, 9, 8, 7, 6 or 5 amino acid residues are preferred. An envisaged peptide linker with less than 5 amino acids comprises 4, 3, 2 or one amino acid(s), wherein Gly-rich linkers are preferred. A particularly preferred “single” amino acid in the context of said “peptide linker” is Gly. Accordingly, said peptide linker may consist of the single amino acid Gly. Another preferred embodiment of a peptide linker is characterized by the amino acid sequence Gly-Gly-Gly-Gly-Ser, i.e. Gly4Ser (SEQ ID NO: 286), or polymers thereof, i.e. (Gly4Ser)x, where x is an integer of 1 or greater (e.g. 2 or 3). Preferred linkers are depicted in SEQ ID NOs: 285-293. The characteristics of said peptide linker, which comprise the absence of the promotion of secondary structures, are known in the art and are described e.g. in Dall'Acqua et al. (Biochem. (1998) 37, 9266-9273), Cheadle et al. (Mol Immunol (1992) 29, 21-30) and Raag and Whitlow (FASEB (1995) 9(1), 73-80). Peptide linkers which furthermore do not promote any secondary structures are preferred. The linkage of said domains to each other can be provided, e.g., by genetic engineering, as described in the examples. Methods for preparing fused and operatively linked bispecific single chain constructs and expressing them in mammalian cells or bacteria are well-known in the art (e.g. WO 99/54440 or Sambrook et al., Molecular Cloning: A Laboratory Manual, Cold Spring Harbor Laboratory Press, Cold Spring Harbor, N.Y., 2001).

[0104] As described herein above, the invention provides a preferred embodiment wherein the antibody construct is in a format selected from the group consisting of (scFv)2, scFv-single domain mAb, diabodies and oligomers of any of the aforementioned formats. The term “is in a format” does not exclude that the construct can be further modified, e.g. by attachment or fusion to other moieties, as described herein.

[0105] According to a particularly preferred embodiment, and as documented in the appended examples, the antibody construct of the invention is a “bispecific single chain antibody construct”, more preferably a bispecific “single chain Fv” (scFv). Although the two domains of the Fv fragment, VL and VH, are coded for by separate genes, they can be joined, using recombinant methods, by a synthetic linker—as described hereinbefore—that enables them to be made as a single protein chain in which the VL and VH regions pair to form a monovalent molecule; see e.g., Huston et al. (1988) Proc. Natl. Acad. Sci USA 85:5879-5883). These antibody fragments are obtained using conventional techniques known to those with skill in the art, and the fragments are evaluated for function in the same manner as are whole or full-length antibodies. A single-chain variable fragment (scFv) is hence a fusion protein of the variable region of the heavy chain (VH) and of the light chain (VL) of immunoglobulins, usually connected with a short linker peptide of about ten to about 25 amino acids, preferably about 15 to 20 amino acids. The linker is usually rich in glycine for flexibility, as well as serine or threonine for solubility, and can either connect the N-terminus of the VH with the C-terminus of the VL, or vice versa. This protein retains the specificity of the original immunoglobulin, despite removal of the constant regions and introduction of the linker.

[0106] Bispecific single chain molecules are known in the art and are described in WO 99/54440, Mack, J. Immunol. (1997), 158, 3965-3970, Mack, PNAS, (1995), 92, 7021-7025, Kufer, Cancer Immunol. Immunother., (1997), 45, 193-197, Löffler, Blood, (2000), 95, 6, 2098-2103, Brühl, Immunol., (2001), 166, 2420-2426, Kipriyanov, J. Mol. Biol., (1999), 293, 41-56. Techniques described for the production of single chain antibodies (see, inter alia, U.S. Pat. No. 4,946,778, Kontermann and Dübel (2010), loc. cit. and Little (2009), loc. cit.) can be adapted to produce single chain antibody constructs specifically recognizing (an) elected target(s).

[0107] Bivalent (also called divalent) or bispecific single-chain variable fragments (bi-scFvs or di-scFvs having the format (scFv)2 can be engineered by linking two scFv molecules (e.g. with linkers as described hereinbefore). If these two scFv molecules have the same binding specificity, the resulting (scFv)2 molecule will preferably be called bivalent (i.e. it has two valences for the same target epitope). If the two scFv molecules have different binding specificities, the resulting (scFv)2 molecule will preferably be called bispecific. The linking can be done by producing a single peptide chain with two VH regions and two VL regions, yielding tandem scFvs (see e.g. Kufer P. et al., (2004) Trends in Biotechnology 22(5):238-244). Another possibility is the creation of scFv molecules with linker peptides that are too short for the two variable regions to fold together (e.g. about five amino acids), forcing the scFvs to dimerize. This type is known as diabodies (see e.g. Hollinger, Philipp et al., (July 1993) Proceedings of the National Academy of Sciences of the United States of America 90 (14): 6444-8.).

[0108] According to a further preferred embodiment of the antibody construct of the invention the heavy chain (VH) and the light chain (VL) of a binding domain (binding either to the target antigen DLL3 or to CD3) are not directly connected via a peptide linker as described above, but the binding domains are formed as described for the diabody. Thus, the VH of the CD3 binding domain may be fused to the VL of the DLL3 binding domain via a peptide linker, and the VH of the DLL3 binding domain is fused to the VL of the CD3 binding domain via such peptide linker.

[0109] Single domain antibodies comprise merely one (monomeric) antibody variable domain which is able to bind selectively to a specific antigen, independently of other V regions or domains. The first single domain antibodies were engineered from heavy chain antibodies found in camelids, and these are called VHH fragments. Cartilaginous fishes also have heavy chain antibodies (IgNAR) from which single domain antibodies called VNAR fragments can be obtained. An alternative approach is to split the dimeric variable domains from common immunoglobulins e.g. from humans or rodents into monomers, hence obtaining VH or VL as a single domain Ab. Although most research into single domain antibodies is currently based on heavy chain variable domains, nanobodies derived from light chains have also been shown to bind specifically to target epitopes. Examples of single domain antibodies are called sdAb, nanobodies or single variable domain antibodies.

[0110] A (single domain mAb)2 is hence a monoclonal antibody construct composed of (at least) two single domain monoclonal antibodies, which are individually selected from the group comprising VH, VL, VHH and VNAR. The linker is preferably in the form of a peptide linker. Similarly, an “scFv-single domain mAb” is a monoclonal antibody construct composed of at least one single domain antibody as described above and one scFv molecule as described above. Again, the linker is preferably in the form of a peptide linker.

[0111] It is furthermore envisaged that the present invention provides a bispecific antibody construct comprising a first binding domain which binds to human DLL3 on the surface of a target cell and a second binding domain which binds to human CD3 on the surface of a T cell, wherein the first binding domain binds to an epitope of DLL3 which is comprised within the region as depicted in SEQ ID NO: 259.

[0112] Accordingly, in a further aspect of the invention, the first binding domain of the bispecific antibody construct comprises a VH region comprising CDR-H1, CDR-H2 and CDR-H3 and a VL region comprising CDR-L1, CDR-L2 and CDR-L3 selected from the group consisting of:

[0113] a) CDR-H1 as depicted in SEQ ID NO: 121, CDR-H2 as depicted in SEQ ID NO: 122, CDR-H3 as depicted in SEQ ID NO: 123, CDR-L1 as depicted in SEQ ID NO: 124, CDR-L2 as depicted in SEQ ID NO: 125 and CDR-L3 as depicted in SEQ ID NO: 126;

[0114] b) CDR-H1 as depicted in SEQ ID NO: 131, CDR-H2 as depicted in SEQ ID NO: 132, CDR-H3 as depicted in SEQ ID NO: 133, CDR-L1 as depicted in SEQ ID NO: 134, CDR-L2 as depicted in SEQ ID NO: 135 and CDR-L3 as depicted in SEQ ID NO: 136;

[0115] c) CDR-H1 as depicted in SEQ ID NO: 141, CDR-H2 as depicted in SEQ ID NO: 142, CDR-H3 as depicted in SEQ ID NO: 143, CDR-L1 as depicted in SEQ ID NO: 144, CDR-L2 as depicted in SEQ ID NO: 145 and CDR-L3 as depicted in SEQ ID NO: 146;

[0116] d) CDR-H1 as depicted in SEQ ID NO: 151, CDR-H2 as depicted in SEQ ID NO: 152, CDR-H3 as depicted in SEQ ID NO: 153, CDR-L1 as depicted in SEQ ID NO: 154, CDR-L2 as depicted in SEQ ID NO: 155 and CDR-L3 as depicted in SEQ ID NO: 156; and

[0117] e) CDR-H1 as depicted in SEQ ID NO: 161, CDR-H2 as depicted in SEQ ID NO: 162, CDR-H3 as depicted in SEQ ID NO: 163, CDR-L1 as depicted in SEQ ID NO: 164, CDR-L2 as depicted in SEQ ID NO: 165 and CDR-L3 as depicted in SEQ ID NO: 166;

[0118] f) CDR-H1 as depicted in SEQ ID NO: 131, CDR-H2 as depicted in SEQ ID NO: 439, CDR-H3 as depicted in SEQ ID NO: 133, CDR-L1 as depicted in SEQ ID NO: 134, CDR-L2 as depicted in SEQ ID NO: 135 and CDR-L3 as depicted in SEQ ID NO: 136;

[0119] g) CDR-H1 as depicted in SEQ ID NO: 131, CDR-H2 as depicted in SEQ ID NO: 440, CDR-H3 as depicted in SEQ ID NO: 133, CDR-L1 as depicted in SEQ ID NO: 134, CDR-L2 as depicted in SEQ ID NO: 135 and CDR-L3 as depicted in SEQ ID NO: 136;

[0120] h) CDR-H1 as depicted in SEQ ID NO: 131, CDR-H2 as depicted in SEQ ID NO: 132, CDR-H3 as depicted in SEQ ID NO: 133, CDR-L1 as depicted in SEQ ID NO: 441, CDR-L2 as depicted in SEQ ID NO: 135 and CDR-L3 as depicted in SEQ ID NO: 136;

[0121] i) CDR-H1 as depicted in SEQ ID NO: 131, CDR-H2 as depicted in SEQ ID NO: 132, CDR-H3 as depicted in SEQ ID NO: 133, CDR-L1 as depicted in SEQ ID NO: 442, CDR-L2 as depicted in SEQ ID NO: 135 and CDR-L3 as depicted in SEQ ID NO: 136;

[0122] j) CDR-H1 as depicted in SEQ ID NO: 131, CDR-H2 as depicted in SEQ ID NO: 132, CDR-H3 as depicted in SEQ ID NO: 133, CDR-L1 as depicted in SEQ ID NO: 443, CDR-L2 as depicted in SEQ ID NO: 135 and CDR-L3 as depicted in SEQ ID NO: 136;

[0123] k) CDR-H1 as depicted in SEQ ID NO: 131, CDR-H2 as depicted in SEQ ID NO: 132, CDR-H3 as depicted in SEQ ID NO: 133, CDR-L1 as depicted in SEQ ID NO: 444, CDR-L2 as depicted in SEQ ID NO: 135 and CDR-L3 as depicted in SEQ ID NO: 136;

[0124] l) CDR-H1 as depicted in SEQ ID NO: 131, CDR-H2 as depicted in SEQ ID NO: 439, CDR-H3 as depicted in SEQ ID NO: 133, CDR-L1 as depicted in SEQ ID NO: 441, CDR-L2 as depicted in SEQ ID NO: 135 and CDR-L3 as depicted in SEQ ID NO: 136; and m) CDR-H1 as depicted in SEQ ID NO: 131, CDR-H2 as depicted in SEQ ID NO: 440, CDR-H3 as depicted in SEQ ID NO: 133, CDR-L1 as depicted in SEQ ID NO: 442, CDR-L2 as depicted in SEQ ID NO: 135 and CDR-L3 as depicted in SEQ ID NO: 136.

[0125] In one embodiment, the first binding domain of the antibody construct of the invention comprises a VH region selected from the group consisting of those depicted in SEQ ID NO: 127, SEQ ID NO: 137, SEQ ID NO: 147, SEQ ID NO: 157, SEQ ID NO: 167, SEQ ID NO: 445, SEQ ID NO: 446, SEQ ID NO: 447, SEQ ID NO: 448, SEQ ID NO: 449, SEQ ID NO: 450, SEQ ID NO: 451, SEQ ID NO: 452, SEQ ID NO: 453, SEQ ID NO: 454, and SEQ ID NO: 455.

[0126] In a further embodiment, the first binding domain of the antibody construct of the invention comprises a VL region selected from the group consisting of those depicted in SEQ ID NO: 128, SEQ ID NO: 138, SEQ ID NO: 148, SEQ ID NO: 158, SEQ ID NO: 168, SEQ ID NO: 456, SEQ ID NO: 457, SEQ ID NO: 458, SEQ ID NO: 459, SEQ ID NO: 460, SEQ ID NO: 461, SEQ ID NO: 462, SEQ ID NO: 463, SEQ ID NO: 464, SEQ ID NO: 465, SEQ ID NO: 466, SEQ ID NO: 467, SEQ ID NO: 468, SEQ ID NO: 469, and SEQ ID NO: 470.

[0127] In another embodiment, the first binding domain of the antibody construct of the invention comprises a VH region and a VL region selected from the group consisting of pairs of a VH region and a VL region as depicted in SEQ ID NOs: 127+128; SEQ ID NOs: 137+138; SEQ ID NOs: 147+148; SEQ ID NOs: 157+158; SEQ ID NOs: 167+168; SEQ ID NOs 137+456; SEQ ID NOs 137+457; SEQ ID NOs 137+458; SEQ ID NOs 137+459; SEQ ID NOs 137+460; SEQ ID NOs 445+138; SEQ ID NOs 446+138; SEQ ID NOs 447+138; SEQ ID NOs 445+460; SEQ ID NOs 448+461; SEQ ID NOs 449+462; SEQ ID NOs 450+463; SEQ ID NOs 450+464; SEQ ID NOs 450+465; SEQ ID NOs 450+466; SEQ ID NOs 450+467; SEQ ID NOs 450+468; SEQ ID NOs 451+463; SEQ ID NOs 452+463; SEQ ID NOs 453+463; SEQ ID NOs 451+468; SEQ ID NOs 454+469; and SEQ ID NOs 455+470.

[0128] In a further embodiment, the first binding domain of the antibody construct of the invention comprises a polypeptide selected from the group consisting of those depicted in SEQ ID NO: 129, SEQ ID NO: 139, SEQ ID NO: 149, SEQ ID NO: 159, SEQ ID NO: 169, SEQ ID NO: 471, SEQ ID NO: 472, SEQ ID NO: 473, SEQ ID NO: 474, SEQ ID NO: 475, SEQ ID NO: 476, SEQ ID NO: 477, SEQ ID NO: 478, SEQ ID NO: 479, SEQ ID NO: 480, SEQ ID NO: 481, SEQ ID NO: 482, SEQ ID NO: 483, SEQ ID NO: 484, SEQ ID NO: 485, SEQ ID NO: 486, SEQ ID NO: 487, SEQ ID NO: 488, SEQ ID NO: 489, SEQ ID NO: 490, SEQ ID NO: 491, SEQ ID NO: 492, and SEQ ID NO: 493.

[0129] The above first binding domains (which are specified by their CDRs, VH region and VL region and combinations thereof) characterize as binding domains which bind to a DLL3 epitope comprised within the region as depicted in SEQ ID NO: 259.

[0130] Another preferred antibody construct according to the invention can also be defined as a bispecific antibody construct comprising a first (preferably human) binding domain which binds to human DLL3 on the surface of a target cell and a second binding domain which binds to human CD3 on the surface of a T cell, wherein the first binding domain binds to the same epitope of DLL3 as an antibody selected from the group consisting of DLL3-13, DLL3-14, and DLL3-15, i.e., an antibody comprising a VH region comprising CDR-H1, CDR-H2 and CDR-H3 and a VL region comprising CDR-L1, CDR-L2 and CDR-L3 selected from the group consisting of:

[0131] a) CDR-H1 as depicted in SEQ ID NO: 121, CDR-H2 as depicted in SEQ ID NO: 122, CDR-H3 as depicted in SEQ ID NO: 123, CDR-L1 as depicted in SEQ ID NO: 124, CDR-L2 as depicted in SEQ ID NO: 125 and CDR-L3 as depicted in SEQ ID NO: 126;

[0132] b) CDR-H1 as depicted in SEQ ID NO: 131, CDR-H2 as depicted in SEQ ID NO: 132, CDR-H3 as depicted in SEQ ID NO: 133, CDR-L1 as depicted in SEQ ID NO: 134, CDR-L2 as depicted in SEQ ID NO: 135 and CDR-L3 as depicted in SEQ ID NO: 136; and

[0133] c) CDR-H1 as depicted in SEQ ID NO: 141, CDR-H2 as depicted in SEQ ID NO: 142, CDR-H3 as depicted in SEQ ID NO: 143, CDR-L1 as depicted in SEQ ID NO: 144, CDR-L2 as depicted in SEQ ID NO: 145 and CDR-L3 as depicted in SEQ ID NO: 146.

[0134] Another preferred antibody construct according to the invention can also be defined as a bispecific antibody construct comprising a first (preferably human) binding domain which binds to human DLL3 on the surface of a target cell and a second binding domain which binds to human CD3 on the surface of a T cell, wherein the first binding domain competes for binding with an antibody selected from the group consisting of DLL3-13, DLL3-14, and DLL3-15, i.e., an antibody comprising a VH region comprising CDR-H1, CDR-H2 and CDR-H3 and a VL region comprising CDR-L1, CDR-L2 and CDR-L3 selected from the group consisting of those described above.

[0135] It is also envisaged that the antibody construct of the invention has, in addition to its function to bind to the target molecules DLL3 and CD3, a further function. In this format, the antibody construct is a trifunctional or multifunctional antibody construct by targeting target cells through binding to DLL3, mediating cytotoxic T cell activity through CD3 binding and providing a further function such as a fully functional Fc constant domain mediating antibody-dependent cellular cytotoxicity through recruitment of effector cells like NK cells, a label (fluorescent etc.), a therapeutic agent such as a toxin or radionuclide, and/or means to enhance serum half-life, etc.

[0136] Examples for means to extend serum half-life of the antibody constructs of the invention include peptides, proteins or domains of proteins, which are fused or otherwise attached to the antibody constructs. The group of peptides, proteins or protein domains includes peptides binding to other proteins with preferred pharmacokinetic profile in the human body such as serum albumin (see WO 2009/127691). An alternative concept of such half-life extending peptides includes peptides binding to the neonatal Fc receptor (FcRn, see WO 2007/098420), which can also be used in the constructs of the present invention. The concept of attaching larger domains of proteins or complete proteins includes e.g. the fusion of human serum albumin, variants or mutants of human serum albumin (see WO 2011/051489, WO 2012/059486, WO 2012/150319, WO 2013/135896, WO 2014/072481, WO 2013/075066) or domains thereof as well as the fusion of constant region of immunoglobulins (Fc domains) and variants thereof. Such variants of Fc domains may be optimized/modified in order to allow the desired pairing of dimers or mulimers, to abolish Fc receptor binding (e.g. the Fcγ receptor) or for other reasons. A further concept known in the art to extend the half-life of small protein compounds in the human body is the pegylation of those compounds such as the antibody construct of the present invention.

[0137] In a preferred embodiment, the bispecific antibody constructs according to the invention may be linked (e.g. via peptide bond) with a fusion partner (such as a protein or polypeptide or peptide), e.g. for the purpose of extending the construct's serum half-life. These fusion partners can be selected from human serum albumin (“HSA” or “HALB”) as wells as sequence variants thereof, peptides binding to HSA, peptides binding to FcRn (“FcRn BP”), or constructs comprising an (antibody derived) Fc region. Exemplary sequences of these fusion partners are depicted in SEQ ID NOs: 295-341. In general, the fusion partners may be linked to the N-terminus or to the C-terminus of the bispecific antibody constructs according to the invention, either directly (e.g. via peptide bond) or through a peptide linker such as (GGGGS)n (wherein “n” is an integer of 2 or greater, e.g. 2 or 3 or 4). Suitable peptide linkers are depicted in SEQ ID NOs: 285-293.

[0138] Hence, a preferred antibody construct according to the present invention comprises:

[0139] (a) a polypeptide comprising in the following order starting from the N-terminus:
[0140] a polypeptide having an amino acid sequence selected from the group consisting of SEQ ID NO: 39, SEQ ID NO: 49, SEQ ID NO: 59, SEQ ID NO: 69, SEQ ID NO: 79, SEQ ID NO: 89, SEQ ID NO: 99, SEQ ID NO: 109, SEQ ID NO: 119, SEQ ID NO: 129, SEQ ID NO: 139, SEQ ID NO: 149, SEQ ID NO: 159, SEQ ID NO: 169, SEQ ID NO: 437, SEQ ID NO: 471, SEQ ID NO: 472, SEQ ID NO: 473, SEQ ID NO: 474, SEQ ID NO: 475, SEQ ID NO: 476, SEQ ID NO: 477, SEQ ID NO: 478, SEQ ID NO: 479, SEQ ID NO: 480, SEQ ID NO: 481, SEQ ID NO: 482, SEQ ID NO: 483, SEQ ID NO: 484, SEQ ID NO: 485, SEQ ID NO: 486, SEQ ID NO: 487, SEQ ID NO: 488, SEQ ID NO: 489, SEQ ID NO: 490, SEQ ID NO: 491, SEQ ID NO: 492, SEQ ID NO: 493, and SEQ ID NO: 531;
[0141] a peptide linker having an amino acid sequence selected from the group consisting of SEQ ID NOs: 285-293; and
[0142] a polypeptide having an amino acid sequence selected from the group consisting of SEQ ID NO: 350, SEQ ID NO: 359, SEQ ID NO: 368, SEQ ID NO: 377, SEQ ID NO: 386, SEQ ID NO: 395, SEQ ID NO: 404, SEQ ID NO: 413, SEQ ID NO: 422, SEQ ID NO: 431, and SEQ ID NO: 434; and
[0143] optionally a His-tag, such as the one depicted in SEQ ID NO: 294;

[0144] (b) a polypeptide comprising in the following order starting from the N-terminus:
[0145] a polypeptide having an amino acid sequence selected from the group consisting of SEQ ID NO: 39, SEQ ID NO: 49, SEQ ID NO: 59, SEQ ID NO: 69, SEQ ID NO: 79, SEQ ID NO: 89, SEQ ID NO: 99, SEQ ID NO: 109, SEQ ID NO: 119, SEQ ID NO: 129, SEQ ID NO: 139, SEQ ID NO: 149, SEQ ID NO: 159, SEQ ID NO: 169, SEQ ID NO: 437, SEQ ID NO: 471, SEQ ID NO: 472, SEQ ID NO: 473, SEQ ID NO: 474, SEQ ID NO: 475, SEQ ID NO: 476, SEQ ID NO: 477, SEQ ID NO: 478, SEQ ID NO: 479, SEQ ID NO: 480, SEQ ID NO: 481, SEQ ID NO: 482, SEQ ID NO: 483, SEQ ID NO: 484, SEQ ID NO: 485, SEQ ID NO: 486, SEQ ID NO: 487, SEQ ID NO: 488, SEQ ID NO: 489, SEQ ID NO: 490, SEQ ID NO: 491, SEQ ID NO: 492, SEQ ID NO: 493, and SEQ ID NO: 531;
[0146] a peptide linker having an amino acid sequence selected from the group consisting of SEQ ID NOs: 285-293;
[0147] a polypeptide having an amino acid sequence selected from the group consisting of SEQ ID NO: 350, SEQ ID NO: 359, SEQ ID NO: 368, SEQ ID NO: 377, SEQ ID NO: 386, SEQ ID NO: 395, SEQ ID NO: 404, SEQ ID NO: 413, SEQ ID NO: 422, SEQ ID NO: 431, and SEQ ID NO: 434;
[0148] optionally a peptide linker having an amino acid sequence selected from the group consisting of SEQ ID NOs: 285-293;
[0149] a polypeptide having an amino acid sequence selected from the group consisting of SEQ ID NOs: 295 and 301-330; and
[0150] optionally a His-tag, such as the one depicted in SEQ ID NO: 294;

[0151] (c) a polypeptide comprising in the following order starting from the N-terminus:
[0152] a polypeptide having the amino acid sequence QRFVTGHFGGLX1PANG (SEQ ID NO: 296) wherein X1 is Y or H; and
[0153] a polypeptide having an amino acid sequence selected from the group consisting of SEQ ID NO: 39, SEQ ID NO: 49, SEQ ID NO: 59, SEQ ID NO: 69, SEQ ID NO: 79, SEQ ID NO: 89, SEQ ID NO: 99, SEQ ID NO: 109, SEQ ID NO: 119, SEQ ID NO: 129, SEQ ID NO: 139, SEQ ID NO: 149, SEQ ID NO: 159, SEQ ID NO: 169, SEQ ID NO: 437, SEQ ID NO: 471, SEQ ID NO: 472, SEQ ID NO: 473, SEQ ID NO: 474, SEQ ID NO: 475, SEQ ID NO: 476, SEQ ID NO: 477, SEQ ID NO: 478, SEQ ID NO: 479, SEQ ID NO: 480, SEQ ID NO: 481, SEQ ID NO: 482, SEQ ID NO: 483, SEQ ID NO: 484, SEQ ID NO: 485, SEQ ID NO: 486, SEQ ID NO: 487, SEQ ID NO: 488, SEQ ID NO: 489, SEQ ID NO: 490, SEQ ID NO: 491, SEQ ID NO: 492, SEQ ID NO: 493, and SEQ ID NO: 531;
[0154] a peptide linker having an amino acid sequence selected from the group consisting of SEQ ID NOs: 285-293;
[0155] a polypeptide having an amino acid sequence selected from the group consisting of SEQ ID NO: 350, SEQ ID NO: 359, SEQ ID NO: 368, SEQ ID NO: 377, SEQ ID NO: 386, SEQ ID NO: 395, SEQ ID NO: 404, SEQ ID NO: 413, SEQ ID NO: 422, SEQ ID NO: 431, and SEQ ID NO: 434;
[0156] a polypeptide having the amino acid sequence QRFVTGHFGGLHPANG (SEQ ID NO: 298) or QRFCTGHFGGLHPCNG (SEQ ID NO: 300); and
[0157] optionally a His-tag, such as the one depicted in SEQ ID NO: 294;

[0158] (d) a polypeptide comprising in the following order starting from the N-terminus
[0159] a polypeptide having an amino acid sequence selected from the group consisting of SEQ ID NO: 348, SEQ ID NO: 357, SEQ ID NO: 366, SEQ ID NO: 375, SEQ ID NO: 384, SEQ ID NO: 393, SEQ ID NO: 402, SEQ ID NO: 411, SEQ ID NO: 420, SEQ ID NO: 429, and SEQ ID NO: 432;
[0160] a peptide linker having the amino acid sequence depicted in SEQ ID NO: 292;
[0161] a polypeptide having an amino acid sequence selected from the group consisting of SEQ ID NO: 38, SEQ ID NO: 48, SEQ ID NO: 58, SEQ ID NO: 68, SEQ ID NO: 78, SEQ ID NO: 88, SEQ ID NO: 98, SEQ ID NO: 108, SEQ ID NO: 118, SEQ ID NO: 128, SEQ ID NO: 138, SEQ ID NO: 148, SEQ ID NO: 158, SEQ ID NO: 168, SEQ ID NO: 436, SEQ ID NO: 456, SEQ ID NO: 457, SEQ ID NO: 458, SEQ ID NO: 459, SEQ ID NO: 460, SEQ ID NO: 461, SEQ ID NO: 462, SEQ ID NO: 463, SEQ ID NO: 464, SEQ ID NO: 465, SEQ ID NO: 466, SEQ ID NO: 467, SEQ ID NO: 468, SEQ ID NO: 469, SEQ ID NO: 470, and SEQ ID NO: 530, followed by a serine residue at the C-terminus;
[0162] a polypeptide having the amino acid sequence depicted in SEQ ID NO: 331; and
[0163] a polypeptide comprising in the following order starting from the N-terminus:
[0164] a polypeptide having an amino acid sequence selected from the group consisting of SEQ ID NO: 37, SEQ ID NO: 47, SEQ ID NO: 57, SEQ ID NO: 67, SEQ ID NO: 77, SEQ ID NO: 87, SEQ ID NO: 97, SEQ ID NO: 107, SEQ ID NO: 117, SEQ ID NO: 127, SEQ ID NO: 137, SEQ ID NO: 147, SEQ ID NO: 157, SEQ ID NO: 167, SEQ ID NO: 435, SEQ ID NO: 445, SEQ ID NO: 446, SEQ ID NO: 447, SEQ ID NO: 448, SEQ ID NO: 449, SEQ ID NO: 450, SEQ ID NO: 451, SEQ ID NO: 452, SEQ ID NO: 453, SEQ ID NO: 454, and SEQ ID NO: 455, and SEQ ID NO: 529;
[0165] a peptide linker having the amino acid sequence depicted in SEQ ID NO: 292;
[0166] a polypeptide having an amino acid sequence selected from the group consisting of SEQ ID NO: 349, SEQ ID NO: 358, SEQ ID NO: 367, SEQ ID NO: 376, SEQ ID NO: 385, SEQ ID NO: 394, SEQ ID NO: 403, SEQ ID NO: 412, SEQ ID NO: 421, SEQ ID NO: 430, and SEQ ID NO: 433 followed by a serine residue at the C-terminus; and
[0167] a polypeptide having the amino acid sequence depicted in SEQ ID NO: 332;

[0168] (e) a polypeptide comprising in the following order starting from the N-terminus:
[0169] a polypeptide having an amino acid sequence selected from the group consisting of SEQ ID NO: 348, SEQ ID NO: 357, SEQ ID NO: 366, SEQ ID NO: 375, SEQ ID NO: 384, SEQ ID NO: 393, SEQ ID NO: 402, SEQ ID NO: 411, SEQ ID NO: 420, SEQ ID NO: 429, and SEQ ID NO: 432;
[0170] a peptide linker having the amino acid sequence depicted in SEQ ID NO: 292;
[0171] a polypeptide having an amino acid sequence selected from the group consisting of SEQ ID NO: 38, SEQ ID NO: 48, SEQ ID NO: 58, SEQ ID NO: 68, SEQ ID NO: 78, SEQ ID NO: 88, SEQ ID NO: 98, SEQ ID NO: 108, SEQ ID NO: 118, SEQ ID NO: 128, SEQ ID NO: 138, SEQ ID NO: 148, SEQ ID NO: 158, SEQ ID NO: 168, SEQ ID NO: 436, SEQ ID NO: 456, SEQ ID NO: 457, SEQ ID NO: 458, SEQ ID NO: 459, SEQ ID NO: 460, SEQ ID NO: 461, SEQ ID NO: 462, SEQ ID NO: 463, SEQ ID NO: 464, SEQ ID NO: 465, SEQ ID NO: 466, SEQ ID NO: 467, SEQ ID NO: 468, SEQ ID NO: 469, SEQ ID NO: 470, and SEQ ID NO: 530; and
[0172] a polypeptide having the amino acid sequence depicted in SEQ ID NO: 333; and
[0173] a polypeptide comprising in the following order starting from the N-terminus:
[0174] a polypeptide having an amino acid sequence selected from the group consisting of SEQ ID NO: 37, SEQ ID NO: 47, SEQ ID NO: 57, SEQ ID NO: 67, SEQ ID NO: 77, SEQ ID NO: 87, SEQ ID NO: 97, SEQ ID NO: 107, SEQ ID NO: 117, SEQ ID NO: 127, SEQ ID NO: 137, SEQ ID NO: 147, SEQ ID NO: 157, and SEQ ID NO: 167, SEQ ID NO: 435, SEQ ID NO: 445, SEQ ID NO: 446, SEQ ID NO: 447, SEQ ID NO: 448, SEQ ID NO: 449, SEQ ID NO: 450, SEQ ID NO: 451, SEQ ID NO: 452, SEQ ID NO: 453, SEQ ID NO: 454, SEQ ID NO: 455, and SEQ ID NO: 529;
[0175] a peptide linker having the amino acid sequence depicted in SEQ ID NO: 292;
[0176] a polypeptide having an amino acid sequence selected from the group consisting of SEQ ID NO: 349, SEQ ID NO: 358, SEQ ID NO: 367, SEQ ID NO: 376, SEQ ID NO: 385, SEQ ID NO: 394, SEQ ID NO: 403, SEQ ID NO: 412, SEQ ID NO: 421, SEQ ID NO: 430, and SEQ ID NO: 433 followed by a serine residue at the C-terminus; and
[0177] a polypeptide having the amino acid sequence depicted in SEQ ID NO: 334;

[0178] (f) a polypeptide comprising in the following order starting from the N-terminus:
[0179] a polypeptide having an amino acid sequence selected from the group consisting of SEQ ID NO: 39, SEQ ID NO: 49, SEQ ID NO: 59, SEQ ID NO: 69, SEQ ID NO: 79, SEQ ID NO: 89, SEQ ID NO: 99, SEQ ID NO: 109, SEQ ID NO: 119, SEQ ID NO: 129, SEQ ID NO: 139, SEQ ID NO: 149, SEQ ID NO: 159, SEQ ID NO: 169, SEQ ID NO: 437, SEQ ID NO: 471, SEQ ID NO: 472, SEQ ID NO: 473, SEQ ID NO: 474, SEQ ID NO: 475, SEQ ID NO: 476, SEQ ID NO: 477, SEQ ID NO: 478, SEQ ID NO: 479, SEQ ID NO: 480, SEQ ID NO: 481, SEQ ID NO: 482, SEQ ID NO: 483, SEQ ID NO: 484, SEQ ID NO: 485, SEQ ID NO: 486, SEQ ID NO: 487, SEQ ID NO: 488, SEQ ID NO: 489, SEQ ID NO: 490, SEQ ID NO: 491, SEQ ID NO: 492, SEQ ID NO: 493, and SEQ ID NO: 531;
[0180] a peptide linker having an amino acid sequence selected from the group consisting of SEQ ID NOs: 285-293;
[0181] a polypeptide having an amino acid sequence selected from the group consisting of SEQ ID NO: 350, SEQ ID NO: 359, SEQ ID NO: 368, SEQ ID NO: 377, SEQ ID NO: 386, SEQ ID NO: 395, SEQ ID NO: 404, SEQ ID NO: 413, SEQ ID NO: 422, SEQ ID NO: 431, and SEQ ID NO: 434;
[0182] a polypeptide having the amino acid sequence depicted in SEQ ID NO: 335; and
[0183] a polypeptide having the amino acid sequence depicted in SEQ ID NO: 336;

[0184] (g) a polypeptide comprising in the following order starting from the N-terminus:
[0185] a polypeptide having an amino acid sequence selected from the group consisting of SEQ ID NO: 39, SEQ ID NO: 49, SEQ ID NO: 59, SEQ ID NO: 69, SEQ ID NO: 79, SEQ ID NO: 89, SEQ ID NO: 99, SEQ ID NO: 109, SEQ ID NO: 119, SEQ ID NO: 129, SEQ ID NO: 139, SEQ ID NO: 149, SEQ ID NO: 159, SEQ ID NO: 169, SEQ ID NO: 437, SEQ ID NO: 471, SEQ ID NO: 472, SEQ ID NO: 473, SEQ ID NO: 474, SEQ ID NO: 475, SEQ ID NO: 476, SEQ ID NO: 477, SEQ ID NO: 478, SEQ ID NO: 479, SEQ ID NO: 480, SEQ ID NO: 481, SEQ ID NO: 482, SEQ ID NO: 483, SEQ ID NO: 484, SEQ ID NO: 485, SEQ ID NO: 486, SEQ ID NO: 487, SEQ ID NO: 488, SEQ ID NO: 489, SEQ ID NO: 490, SEQ ID NO: 491, SEQ ID NO: 492, SEQ ID NO: 493, and SEQ ID NO: 531; and
[0186] a polypeptide having the amino acid sequence depicted in SEQ ID NO: 337; and
[0187] a polypeptide comprising in the following order starting from the N-terminus:
[0188] a polypeptide having an amino acid sequence selected from the group consisting of SEQ ID NO: 350, SEQ ID NO: 359, SEQ ID NO: 368, SEQ ID NO: 377, SEQ ID NO: 386, SEQ ID NO: 395, SEQ ID NO: 404, SEQ ID NO: 413, SEQ ID NO: 422, SEQ ID NO: 431, and SEQ ID NO: 434; and
[0189] a polypeptide having the amino acid sequence depicted in SEQ ID NO: 338;

[0190] (h) a polypeptide comprising in the following order starting from the N-terminus:
[0191] a polypeptide having an amino acid sequence selected from the group consisting of SEQ ID NO: 39, SEQ ID NO: 49, SEQ ID NO: 59, SEQ ID NO: 69, SEQ ID NO: 79, SEQ ID NO: 89, SEQ ID NO: 99, SEQ ID NO: 109, SEQ ID NO: 119, SEQ ID NO: 129, SEQ ID NO: 139, SEQ ID NO: 149, SEQ ID NO: 159, SEQ ID NO: 169, SEQ ID NO: 437, SEQ ID NO: 471, SEQ ID NO: 472, SEQ ID NO: 473, SEQ ID NO: 474, SEQ ID NO: 475, SEQ ID NO: 476, SEQ ID NO: 477, SEQ ID NO: 478, SEQ ID NO: 479, SEQ ID NO: 480, SEQ ID NO: 481, SEQ ID NO: 482, SEQ ID NO: 483, SEQ ID NO: 484, SEQ ID NO: 485, SEQ ID NO: 486, SEQ ID NO: 487, SEQ ID NO: 488, SEQ ID NO: 489, SEQ ID NO: 490, SEQ ID NO: 491, SEQ ID NO: 492, SEQ ID NO: 493, and SEQ ID NO: 531; and
[0192] a polypeptide having the amino acid sequence depicted in SEQ ID NO: 339; and
[0193] a polypeptide comprising in the following order starting from the N-terminus:
[0194] a polypeptide having an amino acid sequence selected from the group consisting of SEQ ID NO: 350, SEQ ID NO: 359, SEQ ID NO: 368, SEQ ID NO: 377, SEQ ID NO: 386, SEQ ID NO: 395, SEQ ID NO: 404, SEQ ID NO: 413, SEQ ID NO: 422, SEQ ID NO: 431, and SEQ ID NO: 434; and
[0195] a polypeptide having the amino acid sequence depicted in SEQ ID NO: 340; or

[0196] (i) a polypeptide comprising in the following order starting from the N-terminus:
[0197] a polypeptide having an amino acid sequence selected from the group consisting of SEQ ID NO: 39, SEQ ID NO: 49, SEQ ID NO: 59, SEQ ID NO: 69, SEQ ID NO: 79, SEQ ID NO: 89, SEQ ID NO: 99, SEQ ID NO: 109, SEQ ID NO: 119, SEQ ID NO: 129, SEQ ID NO: 139, SEQ ID NO: 149, SEQ ID NO: 159, SEQ ID NO: 169, SEQ ID NO: 437, SEQ ID NO: 471, SEQ ID NO: 472, SEQ ID NO: 473, SEQ ID NO: 474, SEQ ID NO: 475, SEQ ID NO: 476, SEQ ID NO: 477, SEQ ID NO: 478, SEQ ID NO: 479, SEQ ID NO: 480, SEQ ID NO: 481, SEQ ID NO: 482, SEQ ID NO: 483, SEQ ID NO: 484, SEQ ID NO: 485, SEQ ID NO: 486, SEQ ID NO: 487, SEQ ID NO: 488, SEQ ID NO: 489, SEQ ID NO: 490, SEQ ID NO: 491, SEQ ID NO: 492, SEQ ID NO: 493, and SEQ ID NO: 531;
[0198] a peptide linker having an amino acid sequence selected from the group consisting of SEQ ID NOs: 285-293;
[0199] a polypeptide having an amino acid sequence selected from the group consisting of SEQ ID NO: 350, SEQ ID NO: 359, SEQ ID NO: 368, SEQ ID NO: 377, SEQ ID NO: 386, SEQ ID NO: 395, SEQ ID NO: 404, SEQ ID NO: 413, SEQ ID NO: 422, SEQ ID NO: 431, and SEQ ID NO: 434; and
[0200] a polypeptide having the amino acid sequence depicted in SEQ ID NO: 341.

[0201] For example, a preferred bispecific antibody construct of the present invention comprises or consists of a polypeptide selected from the group consisting of those depicted in: SEQ ID NO: 224, SEQ ID NO: 225, SEQ ID NO: 226, SEQ ID NO: 227, SEQ ID NO: 228, SEQ ID NO: 229, SEQ ID NO: 230, SEQ ID NO: 231, SEQ ID NO: 232, SEQ ID NO: 233, SEQ ID NO: 234, SEQ ID NO: 235, SEQ ID NO: 236, SEQ ID NO: 237; SEQ ID NO: 242, SEQ ID NO: 243, SEQ ID NO: 244, SEQ ID NO: 245, SEQ ID NO: 246, SEQ ID NO: 247, SEQ ID NO: 248, SEQ ID NO: 249, SEQ ID NO: 250, and SEQ ID NO: 251.

[0202] As described above, several preferred antibody constructs of the invention are modified by fusion with another moiety such as albumin or albumin variants. If these fusion constructs are characterized for their properties, such as in particular their target affinity or cytotoxic activity, the skilled person will be aware that similar fusion constructs or unmodified bispecific antibody constructs can be expected to have similar (or possibly even better) properties. For example, if a bispecific antibody construct fused with albumin has an appreciable or desirable cytotoxic activity or target affinity, it can be expected that the same/similar or even a higher cytotoxic activity/target affinity will be observed for the same construct w/o albumin.

[0203] According to another preferred embodiment, the bispecific antibody construct of the invention comprises (in addition to the two binding domains) a third domain which comprises two polypeptide monomers, each comprising a hinge, a CH2 and a CH3 domain, wherein said two polypeptides (or polypeptide monomers) are fused to each other via a peptide linker. Preferably, said third domain comprises in an N- to C-terminal order: hinge-CH2-CH3-linker-hinge-CH2-CH3. Preferred amino acid sequences for said third domain are depicted in SEQ ID NOs: 541-548. Each of said polypeptide monomers preferably has an amino acid sequence that is selected from the group consisting of SEQ ID NOs: 533-540, or that is at least 90% identical to those sequences. In another preferred embodiment, the first and second binding domains of the bispecific antibody construct of the invention are fused to the third domain via a peptide linker which is for example selected from the group consisting of SEQ ID NOs: 285, 286, 288, 289, 290, 292 and 293.

[0204] In line with the present invention, a “hinge” is an IgG hinge region. This region can be identified by analogy using the Kabat numbering, see Kabat positions 223-243. In line with the above, the minimal requirement for a “hinge” are the amino acid residues corresponding to the IgG1 sequence stretch of D231 to P243 according to the Kabat numbering. The terms CH2 and CH3 refer to the immunoglobulin heavy chain constant regions 2 and 3. These regions can as well be identified by analogy using the Kabat numbering, see Kabat positions 244-360 for CH2 and Kabat positions 361-478 for CH3. Is is understood that there is some variation between the immunoglobulins in terms of their IgG1 Fc region, IgG2 Fc region, IgG3 Fc region, IgG4 Fc region, IgM Fc region, IgA Fc region, IgD Fc region and IgE Fc region (see, e.g., Padlan, Molecular Immunology, 31(3), 169-217 (1993)). The term Fc monomer refers to the last two heavy chain constant regions of IgA, IgD, and IgG, and the last three heavy chain constant regions of IgE and IgM. The Fc monomer can also include the flexible hinge N-terminal to these domains. For IgA and IgM, the Fc monomer may include the J chain. For IgG, the Fc portion comprises immunoglobulin domains CH2 and CH3 and the hinge between the first two domains and CH2. Although the boundaries of the Fc portion of an immunoglobulin may vary, an example for a human IgG heavy chain Fc portion comprising a functional hinge, CH2 and CH3 domain can be defined e.g. to comprise residues D231 (of the hinge domain) to P476 (of the C-terminus of the CH3 domain), or D231 to L476, respectively, for IgG4, wherein the numbering is according to Kabat.

[0205] The antibody construct of the invention may hence comprise in an N- to C-terminal order:

[0206] (a) the first binding domain;

[0207] (b) a peptide linker having an amino acid sequence selected from the group consisting of SEQ ID NOs: 286, 292 and 293;

[0208] (c) the second binding domain;

[0209] (d) a peptide linker having an amino acid sequence selected from the group consisting of SEQ ID NOs: 285, 286, 288, 289, 290, 292 and 293;

[0210] (e) the first polypeptide monomer of the third domain (comprising a hinge, a CH2 and a CH3 domain);

[0211] (f) a peptide linker having an amino acid sequence selected from the group consisting of SEQ ID NOs: 550, 551, 552 and 553; and

[0212] (g) the second polypeptide monomer of the third domain (comprising a hinge, a CH2 and a CH3 domain).

[0213] It is also preferred that the antibody construct of the invention comprises in an N- to C-terminal order:

[0214] the first binding domain having an amino acid sequence selected from the group consisting of SEQ ID NO: 39, SEQ ID NO: 49, SEQ ID NO: 59, SEQ ID NO: 69, SEQ ID NO: 79, SEQ ID NO: 89, SEQ ID NO: 99, SEQ ID NO: 109, SEQ ID NO: 119, SEQ ID NO: 129, SEQ ID NO: 139, SEQ ID NO: 149, SEQ ID NO: 159, SEQ ID NO: 169, SEQ ID NO: 437, SEQ ID NO: 471, SEQ ID NO: 472, SEQ ID NO: 473, SEQ ID NO: 474, SEQ ID NO: 475, SEQ ID NO: 476, SEQ ID NO: 477, SEQ ID NO: 478, SEQ ID NO: 479, SEQ ID NO: 480, SEQ ID NO: 481, SEQ ID NO: 482, SEQ ID NO: 483, SEQ ID NO: 484, SEQ ID NO: 485, SEQ ID NO: 486, SEQ ID NO: 487, SEQ ID NO: 488, SEQ ID NO: 489, SEQ ID NO: 490, SEQ ID NO: 491, SEQ ID NO: 492, SEQ ID NO: 493, and SEQ ID NO: 531;

[0215] a peptide linker having an amino acid sequence selected from the group consisting of SEQ ID NOs: 286, 292 and 293;

[0216] the second binding domain having an amino acid sequence selected from the group consisting of SEQ ID NO: 350, SEQ ID NO: 359, SEQ ID NO: 368, SEQ ID NO: 377, SEQ ID NO: 386, SEQ ID NO: 395, SEQ ID NO: 404, SEQ ID NO: 413, SEQ ID NO: 422, SEQ ID NO: 431, and SEQ ID NO: 434;

[0217] a peptide linker having an amino acid sequence selected from the group consisting of SEQ ID NOs: 285, 286, 288, 289, 290, 292 and 293; and

[0218] the third domain having an amino acid sequence selected from the group consisting of SEQ ID NOs: 541-548.

[0219] Hence, in a preferred embodiment, the antibody construct of the present invention comprises or consists of a polypeptide selected from the group consisting of those depicted in SEQ ID NO: 517, SEQ ID NO: 518, SEQ ID NO: 519, SEQ ID NO: 520, SEQ ID NO: 521, SEQ ID NO: 522, SEQ ID NO: 523, SEQ ID NO: 524, SEQ ID NO: 525, SEQ ID NO: 526, SEQ ID NO: 527, and SEQ ID NO: 528.

[0220] The sequence table (Table 18) also provides sequence variations of the binders denominated DLL3-4 and DLL3-14. The point mutations that were inserted into these sequence variants are identified according to the position of this mutation within the respective scFv molecule. It is understood that an alternative way of identifying these positions is also possible, depending on the polypeptide of reference, which could as well be the CDR region or the VH/VL region. For example, the variant denominated DLL3-4-001 has a G44C-G243C double mutation in its scFv molecule (SEQ ID NO: 437). This translates into a G44C mutation in the corresponding VH chain (SEQ ID NO: 435) and a G101C mutation in the corresponding VL chain (SEQ ID NO: 436).

[0221] Covalent modifications of the antibody constructs are also included within the scope of this invention, and are generally, but not always, done post-translationally. For example, several types of covalent modifications of the antibody construct are introduced into the molecule by reacting specific amino acid residues of the antibody construct with an organic derivatizing agent that is capable of reacting with selected side chains or the N- or C-terminal residues.

[0222] Cysteinyl residues most commonly are reacted with α-haloacetates (and corresponding amines), such as chloroacetic acid or chloroacetamide, to give carboxymethyl or carboxyamidomethyl derivatives. Cysteinyl residues also are derivatized by reaction with bromotrifluoroacetone, α-bromo-β-(5-imidozoyl)propionic acid, chloroacetyl phosphate, N-alkylmaleimides, 3-nitro-2-pyridyl disulfide, methyl 2-pyridyl disulfide, p-chloromercuribenzoate, 2-chloromercuri-4-nitrophenol, or chloro-7-nitrobenzo-2-oxa-1,3-diazole.

[0223] Histidyl residues are derivatized by reaction with diethylpyrocarbonate at pH 5.5-7.0 because this agent is relatively specific for the histidyl side chain. Para-bromophenacyl bromide also is useful; the reaction is preferably performed in 0.1 M sodium cacodylate at pH 6.0. Lysinyl and amino terminal residues are reacted with succinic or other carboxylic acid anhydrides. Derivatization with these agents has the effect of reversing the charge of the lysinyl residues. Other suitable reagents for derivatizing alpha-amino-containing residues include imidoesters such as methyl picolinimidate; pyridoxal phosphate; pyridoxal; chloroborohydride; trinitrobenzenesulfonic acid; O-methylisourea; 2,4-pentanedione; and transaminase-catalyzed reaction with glyoxylate.

[0224] Arginyl residues are modified by reaction with one or several conventional reagents, among them phenylglyoxal, 2,3-butanedione, 1,2-cyclohexanedione, and ninhydrin. Derivatization of arginine residues requires that the reaction be performed in alkaline conditions because of the high pKa of the guanidine functional group. Furthermore, these reagents may react with the groups of lysine as well as the arginine epsilon-amino group.

[0225] The specific modification of tyrosyl residues may be made, with particular interest in introducing spectral labels into tyrosyl residues by reaction with aromatic diazonium compounds or tetranitromethane. Most commonly, N-acetylimidizole and tetranitromethane are used to form 0-acetyl tyrosyl species and 3-nitro derivatives, respectively. Tyrosyl residues are iodinated using ¹²⁵I or ¹³¹I to prepare labeled proteins for use in radioimmunoassay, the chloramine T method described above being suitable.

[0226] Carboxyl side groups (aspartyl or glutamyl) are selectively modified by reaction with carbodiimides (R′—N═C═N—R′), where R and R′ are optionally different alkyl groups, such as 1-cyclohexyl-3-(2-morpholinyl-4-ethyl) carbodiimide or 1-ethyl-3-(4-azonia-4,4-dimethylpentyl) carbodiimide. Furthermore, aspartyl and glutamyl residues are converted to asparaginyl and glutaminyl residues by reaction with ammonium ions.

[0227] Derivatization with bifunctional agents is useful for crosslinking the antibody constructs of the present invention to a water-insoluble support matrix or surface for use in a variety of methods. Commonly used crosslinking agents include, e.g., 1,1-bis(diazoacetyl)-2-phenylethane, glutaraldehyde, N-hydroxysuccinimide esters, for example, esters with 4-azidosalicylic acid, homobifunctional imidoesters, including disuccinimidyl esters such as 3,3′-dithiobis(succinimidylpropionate), and bifunctional maleimides such as bis-N-maleimido-1,8-octane. Derivatizing agents such as methyl-3-[(p-azidophenyl)dithio]propioimidate yield photoactivatable intermediates that are capable of forming crosslinks in the presence of light. Alternatively, reactive water-insoluble matrices such as cyanogen bromide-activated carbohydrates and the reactive substrates as described in U.S. Pat. Nos. 3,969,287; 3,691,016; 4,195,128; 4,247,642; 4,229,537; and 4,330,440 are employed for protein immobilization.

[0228] Glutaminyl and asparaginyl residues are frequently deamidated to the corresponding glutamyl and aspartyl residues, respectively. Alternatively, these residues are deamidated under mildly acidic conditions. Either form of these residues falls within the scope of this invention.

[0229] Other modifications include hydroxylation of proline and lysine, phosphorylation of hydroxyl groups of seryl or threonyl residues, methylation of the α-amino groups of lysine, arginine, and histidine side chains (T. E. Creighton, Proteins: Structure and Molecular Properties, W. H. Freeman & Co., San Francisco, 1983, pp. 79-86), acetylation of the N-terminal amine, and amidation of any C-terminal carboxyl group.

[0230] Another type of covalent modification of the antibody constructs included within the scope of this invention comprises altering the glycosylation pattern of the protein. As is known in the art, glycosylation patterns can depend on both the sequence of the protein (e.g., the presence or absence of particular glycosylation amino acid residues, discussed below), or the host cell or organism in which the protein is produced. Particular expression systems are discussed below.

[0231] Glycosylation of polypeptides is typically either N-linked or O-linked. N-linked refers to the attachment of the carbohydrate moiety to the side chain of an asparagine residue. The tri-peptide sequences asparagine-X-serine and asparagine-X-threonine, where X is any amino acid except proline, are the recognition sequences for enzymatic attachment of the carbohydrate moiety to the asparagine side chain. Thus, the presence of either of these tri-peptide sequences in a polypeptide creates a potential glycosylation site. O-linked glycosylation refers to the attachment of one of the sugars N-acetylgalactosamine, galactose, or xylose, to a hydroxyamino acid, most commonly serine or threonine, although 5-hydroxyproline or 5-hydroxylysine may also be used.

[0232] Addition of glycosylation sites to the antibody construct is conveniently accomplished by altering the amino acid sequence such that it contains one or more of the above-described tri-peptide sequences (for N-linked glycosylation sites). The alteration may also be made by the addition of, or substitution by, one or more serine or threonine residues to the starting sequence (for O-linked glycosylation sites). For ease, the amino acid sequence of an antibody construct is preferably altered through changes at the DNA level, particularly by mutating the DNA encoding the polypeptide at preselected bases such that codons are generated that will translate into the desired amino acids.

[0233] Another means of increasing the number of carbohydrate moieties on the antibody construct is by chemical or enzymatic coupling of glycosides to the protein. These procedures are advantageous in that they do not require production of the protein in a host cell that has glycosylation capabilities for N- and O-linked glycosylation. Depending on the coupling mode used, the sugar(s) may be attached to (a) arginine and histidine, (b) free carboxyl groups, (c) free sulfhydryl groups such as those of cysteine, (d) free hydroxyl groups such as those of serine, threonine, or hydroxyproline, (e) aromatic residues such as those of phenylalanine, tyrosine, or tryptophan, or (f) the amide group of glutamine. These methods are described in WO 87/05330, and in Aplin and Wriston, 1981, CRC Crit. Rev. Biochem., pp. 259-306.

[0234] Removal of carbohydrate moieties present on the starting antibody construct may be accomplished chemically or enzymatically. Chemical deglycosylation requires exposure of the protein to the compound trifluoromethanesulfonic acid, or an equivalent compound. This treatment results in the cleavage of most or all sugars except the linking sugar (N-acetylglucosamine or N-acetylgalactosamine), while leaving the polypeptide intact. Chemical deglycosylation is described by Hakimuddin et al., 1987, Arch. Biochem. Biophys. 259:52 and by Edge et al., 1981, Anal. Biochem. 118:131. Enzymatic cleavage of carbohydrate moieties on polypeptides can be achieved by the use of a variety of endo- and exo-glycosidases as described by Thotakura et al., 1987, Meth. Enzymol. 138:350. Glycosylation at potential glycosylation sites may be prevented by the use of the compound tunicamycin as described by Duskin et al., 1982, J. Biol. Chem. 257:3105. Tunicamycin blocks the formation of protein-N-glycoside linkages.

[0235] Other modifications of the antibody construct are also contemplated herein. For example, another type of covalent modification of the antibody construct comprises linking the antibody construct to various non-proteinaceous polymers, including, but not limited to, various polyols such as polyethylene glycol, polypropylene glycol, polyoxyalkylenes, or copolymers of polyethylene glycol and polypropylene glycol, in the manner set forth in U.S. Pat. Nos. 4,640,835; 4,496,689; 4,301,144; 4,670,417; 4,791,192 or 4,179,337. In addition, as is known in the art, amino acid substitutions may be made in various positions within the antibody construct, e.g. in order to facilitate the addition of polymers such as PEG.

[0236] In some embodiments, the covalent modification of the antibody constructs of the invention comprises the addition of one or more labels. The labelling group may be coupled to the antibody construct via spacer arms of various lengths to reduce potential steric hindrance. Various methods for labelling proteins are known in the art and can be used in performing the present invention. The term “label” or “labelling group” refers to any detectable label. In general, labels fall into a variety of classes, depending on the assay in which they are to be detected—the following examples include, but are not limited to:

[0237] isotopic labels, which may be radioactive or heavy isotopes, such as radioisotopes or radionuclides (e.g., 3H, 14C, 15N, 35S, 89Zr, 90Y, 99Tc, 111In, 125I, 131I)

[0238] magnetic labels (e.g., magnetic particles)

[0239] redox active moieties

[0240] optical dyes (including, but not limited to, chromophores, phosphors and fluorophores) such as fluorescent groups (e.g., FITC, rhodamine, lanthanide phosphors), chemiluminescent groups, and fluorophores which can be either “small molecule” fluores or proteinaceous fluores

[0241] enzymatic groups (e.g. horseradish peroxidase, β-galactosidase, luciferase, alkaline phosphatase)

[0242] biotinylated groups

[0243] predetermined polypeptide epitopes recognized by a secondary reporter (e.g., leucine zipper pair sequences, binding sites for secondary antibodies, metal binding domains, epitope tags, etc.)

[0244] By “fluorescent label” is meant any molecule that may be detected via its inherent fluorescent properties. Suitable fluorescent labels include, but are not limited to, fluorescein, rhodamine, tetramethylrhodamine, eosin, erythrosin, coumarin, methyl-coumarins, pyrene, Malacite green, stilbene, Lucifer Yellow, Cascade BlueJ, Texas Red, IAEDANS, EDANS, BODIPY FL, LC Red 640, Cy 5, Cy 5.5, LC Red 705, Oregon green, the Alexa-Fluor dyes (Alexa Fluor 350, Alexa Fluor 430, Alexa Fluor 488, Alexa Fluor 546, Alexa Fluor 568, Alexa Fluor 594, Alexa Fluor 633, Alexa Fluor 660, Alexa Fluor 680), Cascade Blue, Cascade Yellow and R-phycoerythrin (PE) (Molecular Probes, Eugene, Oreg.), FITC, Rhodamine, and Texas Red (Pierce, Rockford, Ill.), Cy5, Cy5.5, Cy7 (Amersham Life Science, Pittsburgh, Pa.). Suitable optical dyes, including fluorophores, are described in Molecular Probes Handbook by Richard P. Haugland.

[0245] Suitable proteinaceous fluorescent labels also include, but are not limited to, green fluorescent protein, including a Renilla, Ptilosarcus, or Aequorea species of GFP (Chalfie et al., 1994, Science 263:802-805), EGFP (Clontech Laboratories, Inc., Genbank Accession Number U55762), blue fluorescent protein (BFP, Quantum Biotechnologies, Inc. 1801 de Maisonneuve Blvd. West, 8th Floor, Montreal, Quebec, Canada H3H 1J9; Stauber, 1998, Biotechniques 24:462-471; Heim et al., 1996, Curr. Biol. 6:178-182), enhanced yellow fluorescent protein (EYFP, Clontech Laboratories, Inc.), luciferase (Ichiki et al., 1993, J. Immunol. 150:5408-5417), β galactosidase (Nolan et al., 1988, Proc. Natl. Acad. Sci. U.S.A. 85:2603-2607) and Renilla (WO92/15673, WO95/07463, WO98/14605, WO98/26277, WO99/49019, U.S. Pat. Nos. 5,292,658; 5,418,155; 5,683,888; 5,741,668; 5,777,079; 5,804,387; 5,874,304; 5,876,995; 5,925,558).

[0246] Leucine zipper domains are peptides that promote oligomerization of the proteins in which they are found. Leucine zippers were originally identified in several DNA-binding proteins (Landschulz et al., 1988, Science 240:1759), and have since been found in a variety of different proteins. Among the known leucine zippers are naturally occurring peptides and derivatives thereof that dimerize or trimerize. Examples of leucine zipper domains suitable for producing soluble oligomeric proteins are described in PCT application WO 94/10308, and the leucine zipper derived from lung surfactant protein D (SPD) described in Hoppe et al., 1994, FEBS Letters 344:191. The use of a modified leucine zipper that allows for stable trimerization of a heterologous protein fused thereto is described in Fanslow et al., 1994, Semin. Immunol. 6:267-78. In one approach, recombinant fusion proteins comprising a DLL3 antibody fragment or derivative fused to a leucine zipper peptide are expressed in suitable host cells, and the soluble oligomeric DLL3 antibody fragments or derivatives that form are recovered from the culture supernatant.

[0247] The antibody construct of the invention may also comprise additional domains, which are e.g. helpful in the isolation of the molecule or relate to an adapted pharmacokinetic profile of the molecule. Domains helpful for the isolation of an antibody construct may be selected from peptide motives or secondarily introduced moieties, which can be captured in an isolation method, e.g. an isolation column. Non-limiting embodiments of such additional domains comprise peptide motives known as Myc-tag, HAT-tag, HA-tag, TAP-tag, GST-tag, chitin binding domain (CBD-tag), maltose binding protein (MBP-tag), Flag-tag, Strep-tag and variants thereof (e.g. StrepII-tag) and His-tag. All herein disclosed antibody constructs characterized by the identified CDRs are preferred to comprise a His-tag domain, which is generally known as a repeat of consecutive His residues in the amino acid sequence of a molecule, preferably of five, and more preferably of six His residues (hexa-histidine). The His-tag may be located e.g. at the N- or C-terminus of the antibody construct, preferably it is located at the C-terminus. Most preferably, a hexa-histidine tag (HHHHHH) is linked via peptide bond to the C-terminus of the antibody construct according to the invention.

[0248] The first binding domain of the antibody construct of the present invention binds to human DLL3 on the surface of a target cell. The preferred amino acid sequence of human DLL3 is represented by SEQ ID NO: 252. It is understood that the term “on the surface”, in the context of the present invention, means that the binding domain specifically binds to an epitope comprised within the DLL3 extracellular domain (DLL3 ECD). The first binding domain according to the invention hence preferably binds to DLL3 when it is expressed by naturally expressing cells or cell lines, and/or by cells or cell lines transformed or (stably/transiently) transfected with DLL3. In a preferred embodiment the first binding domain also binds to DLL3 when DLL3 is used as a “target” or “ligand” molecule in an in vitro binding assay such as BIAcore or Scatchard. The “target cell” can be any prokaryotic or eukaryotic cell expressing DLL3 on its surface; preferably the target cell is a cell that is part of the human or animal body, such as a specific DLL3 expressing cancer or tumor cell.

[0249] The term “DLL3 ECD” refers to a form of DLL3 which is essentially free of transmembrane and cytoplasmic domains of DLL3. It will be understood by the skilled artisan that the transmembrane domain identified for the DLL3 polypeptide of the present invention is identified pursuant to criteria routinely employed in the art for identifying that type of hydrophobic domain. The exact boundaries of a transmembrane domain may vary but most likely by no more than about 5 amino acids at either end of the domain specifically mentioned herein. A preferred human DLL3 ECD is shown in SEQ ID NO: 253.

[0250] The affinity of the first binding domain for human DLL3 is preferably ≤20 nM, more preferably ≤10 nM, even more preferably ≤5 nM, even more preferably ≤2 nM, even more preferably ≤1 nM, even more preferably ≤0.6 nM, even more preferably ≤0.5 nM, and most preferably ≤0.4 nM. The affinity can be measured for example in a BIAcore assay or in a Scatchard assay, e.g. as described in the Examples. Other methods of determining the affinity are also well-known to the skilled person.

[0251] T cells or T lymphocytes are a type of lymphocyte (itself a type of white blood cell) that play a central role in cell-mediated immunity. There are several subsets of T cells, each with a distinct function. T cells can be distinguished from other lymphocytes, such as B cells and NK cells, by the presence of a T cell receptor (TCR) on the cell surface. The TCR is responsible for recognizing antigens bound to major histocompatibility complex (MHC) molecules and is composed of two different protein chains. In 95% of the T cells, the TCR consists of an alpha (α) and beta (β) chain. When the TCR engages with antigenic peptide and MHC (peptide/MHC complex), the T lymphocyte is activated through a series of biochemical events mediated by associated enzymes, co-receptors, specialized adaptor molecules, and activated or released transcription factors.

[0252] The CD3 receptor complex is a protein complex and is composed of four chains. In mammals, the complex contains a CD3γ (gamma) chain, a CD3δ (delta) chain, and two CD3ε (epsilon) chains. These chains associate with the T cell receptor (TCR) and the so-called ζ (zeta) chain to form the T cell receptor CD3 complex and to generate an activation signal in T lymphocytes. The CD3γ (gamma), CD3δ (delta), and CD3ε (epsilon) chains are highly related cell-surface proteins of the immunoglobulin superfamily containing a single extracellular immunoglobulin domain. The intracellular tails of the CD3 molecules contain a single conserved motif known as an immunoreceptor tyrosine-based activation motif or ITAM for short, which is essential for the signaling capacity of the TCR. The CD3 epsilon molecule is a polypeptide which in humans is encoded by the CD3E gene which resides on chromosome 11. The most preferred epitope of CD3 epsilon is comprised within amino acid residues 1-27 of the human CD3 epsilon extracellular domain.

[0253] The redirected lysis of target cells via the recruitment of T cells by a multispecific, at least bispecific, antibody construct involves cytolytic synapse formation and delivery of perforin and granzymes. The engaged T cells are capable of serial target cell lysis, and are not affected by immune escape mechanisms interfering with peptide antigen processing and presentation, or clonal T cell differentiation; see, for example, WO 2007/042261.

[0254] Cytotoxicity mediated by DLL3×CD3 bispecific antibody constructs can be measured in various ways. See Examples 8.1 to 8.7. Effector cells can be e.g. stimulated enriched (human) CD8 positive T cells or unstimulated (human) peripheral blood mononuclear cells (PBMC). If the target cells are of macaque origin or express or are transfected with macaque DLL3, the effector cells should also be of macaque origin such as a macaque T cell line, e.g. 4119LnPx. The target cells should express (at least the extracellular domain of) DLL3, e.g. human or macaque DLL3. Target cells can be a cell line (such as CHO) which is stably or transiently transfected with DLL3, e.g. human or macaque DLL3. Alternatively, the target cells can be a DLL3 positive natural expresser cell line, such as the human lung carcinoma cell line SHP-77. Usually EC50 values are expected to be lower with target cell lines expressing higher levels of DLL3 on the cell surface. The effector to target cell (E:T) ratio is usually about 10:1, but can also vary. Cytotoxic activity of DLL3×CD3 bispecific antibody constructs can be measured in a 51-chromium release assay (incubation time of about 18 hours) or in a in a FACS-based cytotoxicity assay (incubation time of about 48 hours). Modifications of the assay incubation time (cytotoxic reaction) are also possible. Other methods of measuring cytotoxicity are well-known to the skilled person and comprise MTT or MTS assays, ATP-based assays including bioluminescent assays, the sulforhodamine B (SRB) assay, WST assay, clonogenic assay and the ECIS technology.

[0255] The cytotoxic activity mediated by DLL3×CD3 bispecific antibody constructs of the present invention is preferably measured in a cell-based cytotoxicity assay. It may also be measured in a 51-chromium release assay. It is represented by the EC50 value, which corresponds to the half maximal effective concentration (concentration of the antibody construct which induces a cytotoxic response halfway between the baseline and maximum). Preferably, the EC50 value of the DLL3×CD3 bispecific antibody constructs is ≤5000 pM or ≤4000 pM, more preferably ≤3000 pM or ≤2000 pM, even more preferably ≤1000 pM or ≤500 pM, even more preferably ≤400 pM or ≤300 pM, even more preferably ≤200 pM, even more preferably ≤100 pM, even more preferably ≤50 pM, even more preferably ≤20 pM or ≤0 pM, and most preferably ≤5 pM.

[0256] The above given EC50 values can be measured in different assays. The skilled person is aware that an EC50 value can be expected to be lower when stimulated/enriched CD8+ T cells are used as effector cells, compared with unstimulated PBMC. It can furthermore be expected that the EC50 values are lower when the target cells express a high number of the target antigen compared with a low target expression rat. For example, when stimulated/enriched human CD8+ T cells are used as effector cells (and either DLL3 transfected cells such as CHO cells or a DLL3 positive human lung carcinoma cell line SHP-77 are used as target cells), the EC50 value of the DLL3×CD3 bispecific antibody construct is preferably ≤1000 pM, more preferably ≤500 pM, even more preferably ≤250 pM, even more preferably ≤100 pM, even more preferably ≤50 pM, even more preferably ≤10 pM, and most preferably ≤5 pM. When human PBMCs are used as effector cells, the EC50 value of the DLL3×CD3 bispecific antibody construct is preferably ≤5000 pM or ≤4000 pM (in particular when the target cells are a DLL3 positive human lung carcinoma cell line SHP-77), more preferably ≤2000 pM (in particular when the target cells are DLL3 transfected cells such as CHO cells), more preferably ≤1000 pM or ≤500 pM, even more preferably ≤200 pM, even more preferably ≤150 pM, even more preferably ≤100 pM, and most preferably ≤50 pM, or lower. When a macaque T cell line such as LnPx4119 is used as effector cells, and a macaque DLL3 transfected cell line such as CHO cells is used as target cell line, the EC50 value of the DLL3×CD3 bispecific antibody construct is preferably ≤2000 pM or ≤1500 pM, more preferably ≤1000 pM or ≤500 pM, even more preferably ≤300 pM or ≤250 pM, even more preferably ≤100 pM, and most preferably ≤50 pM.

[0257] Preferably, the DLL3×CD3 bispecific antibody constructs of the present invention do not induce/mediate lysis or do not essentially induce/mediate lysis of DLL3 negative cells such as CHO cells. The term “do not induce lysis”, “do not essentially induce lysis”, “do not mediate lysis” or “do not essentially mediate lysis” means that an antibody construct of the present invention does not induce or mediate lysis of more than 30%, preferably not more than 20%, more preferably not more than 10%, particularly preferably not more than 9%, 8%, 7%, 6% or 5% of DLL3 negative cells, whereby lysis of a DLL3 positive human lung carcinoma cell line SHP-77 (see above) is set to be 100%. This usually applies for concentrations of the antibody construct of up to 500 nM. The skilled person knows how to measure cell lysis without further ado. Moreover, the present specification teaches specific instructions how to measure cell lysis.

[0258] The difference in cytotoxic activity between the monomeric and the dimeric isoform of individual DLL3×CD3 bispecific antibody constructs is referred to as “potency gap”. This potency gap can e.g. be calculated as ratio between EC50 values of the molecule's monomeric and dimeric form, see Example 15. Potency gaps of the DLL3×CD3 bispecific antibody constructs of the present invention are preferably ≤5, more preferably ≤4, even more preferably ≤3, even more preferably ≤2 and most preferably ≤1.

[0259] The first and/or the second (or any further) binding domain(s) of the antibody construct of the invention is/are preferably cross-species specific for members of the mammalian order of primates. Cross-species specific CD3 binding domains are, for example, described in WO 2008/119567. According to one embodiment, the first and/or second binding domain, in addition to binding to human DLL3 and human CD3, respectively, will also bind to DLL3/CD3 of primates including (but not limited to) new world primates (such as Callithrix jacchus, Saguinus Oedipus or Saimiri sciureus), old world primates (such as baboons and macaques), gibbons, orangutans and non-human homininae. It is envisaged that the first binding domain of the antibody construct of the invention which binds to human DLL3 on the surface of a target cell also binds at least to macaque DLL3, and/or the second binding domain which binds to human CD3 on the surface of a T cell also binds at least to macaque CD3. A preferred macaque is Macaca fascicularis. Macaca mulatta (Rhesus) is also envisaged.

[0260] A preferred bispecific antibody construct of the invention comprises a first binding domain which binds to human DLL3 on the surface of a target cell and a second binding domain which binds to human CD3 on the surface of a T cell and at least macaque CD3. In one aspect of this embodiment, the first binding domain binds to an epitope of DLL3 which is comprised within the region as depicted in SEQ ID NO: 260.

[0261] In one aspect of the invention, the first binding domain binds to human DLL3 and further binds to macaque DLL3, such as DLL3 of Macaca fascicularis, and more preferably, to macaque DLL3 ECD. A preferred Macaca fascicularis DLL3 is depicted in SEQ ID NO: 271. A preferred macaque DLL3 ECD is depicted in SEQ ID NO: 272. The affinity of the first binding domain for macaque DLL3 is preferably ≤15 nM, more preferably ≤10 nM, even more preferably ≤5 nM, even more preferably ≤1 nM, even more preferably ≤0.5 nM, even more preferably ≤0.1 nM, and most preferably ≤0.05 nM or even ≤0.01 nM.

[0262] Preferably the affinity gap of the antibody constructs according to the invention for binding macaque DLL3 versus human DLL3 [ma DLL3:hu DLL3] (as determined e.g. by BiaCore or by Scatchard analysis) is between 0.1 and 10, more preferably between 0.2 and 5, even more preferably between 0.3 and 4, even more preferably between 0.5 and 3 or between 0.5 and 2.5, and most preferably between 0.5 and 2 or between 0.6 and 2. See Examples 3 and 4.

[0263] In one embodiment of the antibody construct of the invention, the second binding domain binds to human CD3 epsilon and to Callithrix jacchus, Saguinus Oedipus or Saimiri sciureus CD3 epsilon. Preferably, the second binding domain binds to an extracellular epitope of these CD3 epsilon chains. It is also envisaged that the second binding domain binds to an extracellular epitope of the human and the Macaca CD3 epsilon chain. The most preferred epitope of CD3 epsilon is comprised within amino acid residues 1-27 of the human CD3 epsilon extracellular domain. Even more specifically, the epitope comprises at least the amino acid sequence Gln-Asp-Gly-Asn-Glu. Callithrix jacchus and Saguinus oedipus are both new world primate belonging to the family of Callitrichidae, while Saimiri sciureus is a new world primate belonging to the family of Cebidae.

[0264] It is particularly preferred for the antibody construct of the present invention that the second binding domain which binds to human CD3 on the surface of a T cell comprises a VL region comprising CDR-L1, CDR-L2 and CDR-L3 selected from:

[0265] (a) CDR-L1 as depicted in SEQ ID NO: 27 of WO 2008/119567 (SEQ ID NO: 342 herein), CDR-L2 as depicted in SEQ ID NO: 28 of WO 2008/119567 (SEQ ID NO: 343 herein) and CDR-L3 as depicted in SEQ ID NO: 29 of WO 2008/119567 (SEQ ID NO: 344 herein);

[0266] (b) CDR-L1 as depicted in SEQ ID NO: 117 of WO 2008/119567 (SEQ ID NO: 351 herein), CDR-L2 as depicted in SEQ ID NO: 118 of WO 2008/119567 (SEQ ID NO: 352 herein) and CDR-L3 as depicted in SEQ ID NO: 119 of WO 2008/119567 (SEQ ID NO: 353 herein); and

[0267] (c) CDR-L1 as depicted in SEQ ID NO: 153 of WO 2008/119567 (SEQ ID NO: 360 herein), CDR-L2 as depicted in SEQ ID NO: 154 of WO 2008/119567 (SEQ ID NO: 361 herein) and CDR-L3 as depicted in SEQ ID NO: 155 of WO 2008/119567 (SEQ ID NO: 362 herein).

[0268] In an alternatively preferred embodiment of the antibody construct of the present invention, the second binding domain which binds to human CD3 on the surface of a T cell comprises a VH region comprising CDR-H 1, CDR-H2 and CDR-H3 selected from:

[0269] (a) CDR-H1 as depicted in SEQ ID NO: 12 of WO 2008/119567 (SEQ ID NO: 345 herein), CDR-H2 as depicted in SEQ ID NO: 13 of WO 2008/119567 (SEQ ID NO: 346 herein) and CDR-H3 as depicted in SEQ ID NO: 14 of WO 2008/119567 (SEQ ID NO: 347 herein);

[0270] (b) CDR-H1 as depicted in SEQ ID NO: 30 of WO 2008/119567 (SEQ ID NO: 354 herein), CDR-H2 as depicted in SEQ ID NO: 31 of WO 2008/119567 (SEQ ID NO: 355 herein) and CDR-H3 as depicted in SEQ ID NO: 32 of WO 2008/119567 (SEQ ID NO: 356 herein);

[0271] (c) CDR-H1 as depicted in SEQ ID NO: 48 of WO 2008/119567 (SEQ ID NO: 363 herein), CDR-H2 as depicted in SEQ ID NO: 49 of WO 2008/119567 (SEQ ID NO: 364 herein) and CDR-H3 as depicted in SEQ ID NO: 50 of WO 2008/119567 (SEQ ID NO: 365 herein);

[0272] (d) CDR-H1 as depicted in SEQ ID NO: 66 of WO 2008/119567 (SEQ ID NO: 372 herein), CDR-H2 as depicted in SEQ ID NO: 67 of WO 2008/119567 (SEQ ID NO: 373 herein) and CDR-H3 as depicted in SEQ ID NO: 68 of WO 2008/119567 (SEQ ID NO: 374 herein);

[0273] (e) CDR-H1 as depicted in SEQ ID NO: 84 of WO 2008/119567 (SEQ ID NO: 381 herein), CDR-H2 as depicted in SEQ ID NO: 85 of WO 2008/119567 (SEQ ID NO: 382 herein) and CDR-H3 as depicted in SEQ ID NO: 86 of WO 2008/119567 (SEQ ID NO: 383 herein);

[0274] (f) CDR-H1 as depicted in SEQ ID NO: 102 of WO 2008/119567 (SEQ ID NO: 390 herein), CDR-H2 as depicted in SEQ ID NO: 103 of WO 2008/119567 (SEQ ID NO: 391 herein) and CDR-H3 as depicted in SEQ ID NO: 104 of WO 2008/119567 (SEQ ID NO: 392 herein);

[0275] (g) CDR-H1 as depicted in SEQ ID NO: 120 of WO 2008/119567 (SEQ ID NO: 399 herein), CDR-H2 as depicted in SEQ ID NO: 121 of WO 2008/119567 (SEQ ID NO: 400 herein) and CDR-H3 as depicted in SEQ ID NO: 122 of WO 2008/119567 (SEQ ID NO: 401 herein);

[0276] (h) CDR-H1 as depicted in SEQ ID NO: 138 of WO 2008/119567 (SEQ ID NO: 408 herein), CDR-H2 as depicted in SEQ ID NO: 139 of WO 2008/119567 (SEQ ID NO: 409 herein) and CDR-H3 as depicted in SEQ ID NO: 140 of WO 2008/119567 (SEQ ID NO: 410 herein);

[0277] (i) CDR-H1 as depicted in SEQ ID NO: 156 of WO 2008/119567 (SEQ ID NO: 417 herein), CDR-H2 as depicted in SEQ ID NO: 157 of WO 2008/119567 (SEQ ID NO: 418 herein) and CDR-H3 as depicted in SEQ ID NO: 158 of WO 2008/119567 (SEQ ID NO: 419 herein); and

[0278] (j) CDR-H1 as depicted in SEQ ID NO: 174 of WO 2008/119567 (SEQ ID NO: 426 herein), CDR-H2 as depicted in SEQ ID NO: 175 of WO 2008/119567 (SEQ ID NO: 427 herein) and CDR-H3 as depicted in SEQ ID NO: 176 of WO 2008/119567 (SEQ ID NO: 428 herein).

[0279] It is further preferred for the antibody construct of the present invention that the second binding domain which binds to human CD3 on the surface of a T cell comprises a VL region selected from the group consisting of a VL region as depicted in SEQ ID NO: 35, 39, 125, 129, 161 or 165 of WO 2008/119567 (respectively, SEQ ID NO: 349, 555, 385, 556, 421, or 557 herein).

[0280] It is alternatively preferred that the second binding domain which binds to human CD3 on the surface of a T cell comprises a VH region selected from the group consisting of a VH region as depicted in SEQ ID NO: 15, 19, 33, 37, 51, 55, 69, 73, 87, 91, 105, 109, 123, 127, 141, 145, 159, 163, 177 or 181 of WO 2008/119567 (respectively, SEQ ID NO: 348, 558, 357, 559, 366, 560, 375, 561, 384, 562, 393, 563, 402, 564, 411, 565, 450, 566, 357, or 559 herein).

[0281] More preferably, the antibody construct of the present invention is characterized by the second binding domain which binds to human CD3 on the surface of a T cell comprising a VL region and a VH region selected from the group consisting of:

[0282] (a) a VL region as depicted in SEQ ID NO: 17 or 21 of WO 2008/119567 (SEQ ID NO: 349 or 555 herein) and a VH region as depicted in SEQ ID NO: 15 or 19 of WO 2008/119567 (SEQ ID NO: 348 or 558 herein);

[0283] (b) a VL region as depicted in SEQ ID NO: 35 or 39 of WO 2008/119567 (SEQ ID NO: 349 or 555 herein) and a VH region as depicted in SEQ ID NO: 33 or 37 of WO 2008/119567 (SEQ ID NO: 357 or 559 herein);

[0284] (c) a VL region as depicted in SEQ ID NO: 53 or 57 of WO 2008/119567 (SEQ ID NO: 349 or 555 herein) and a VH region as depicted in SEQ ID NO: 51 or 55 of WO 2008/119567 (SEQ ID NO:366 or 560 herein);

[0285] (d) a VL region as depicted in SEQ ID NO: 71 or 75 of WO 2008/119567 (SEQ ID NO: 349 or 555 herein) and a VH region as depicted in SEQ ID NO: 69 or 73 of WO 2008/119567 (SEQ ID NO: 375 or 561 herein);

[0286] (e) a VL region as depicted in SEQ ID NO: 89 or 93 of WO 2008/119567 (SEQ ID NO: 385 or 556 herein) and a VH region as depicted in SEQ ID NO: 87 or 91 of WO 2008/119567 (SEQ ID NO: 384 or 562 herein);

[0287] (f) a VL region as depicted in SEQ ID NO: 107 or 111 of WO 2008/119567 (SEQ ID NO: 349 or 555 herein) and a VH region as depicted in SEQ ID NO: 105 or 109 of WO 2008/119567 (SEQ ID NO:393 or 563 herein);

[0288] (g) a VL region as depicted in SEQ ID NO: 125 or 129 of WO 2008/119567 (SEQ ID NO: 385 or 556 herein) and a VH region as depicted in SEQ ID NO: 123 or 127 of WO 2008/119567 (SEQ ID NO:402 or 564 herein);

[0289] (h) a VL region as depicted in SEQ ID NO: 143 or 147 of WO 2008/119567 (SEQ ID NO: 349 or 555 herein) and a VH region as depicted in SEQ ID NO: 141 or 145 of WO 2008/119567 (SEQ ID NO: 411 or 565 herein);

[0290] (i) a VL region as depicted in SEQ ID NO: 161 or 165 of WO 2008/119567 (SEQ ID NO: 421 or 557 herein) and a VH region as depicted in SEQ ID NO: 159 or 163 of WO 2008/119567 (SEQ ID NO: 420 or 566 herein); and

[0291] (j) a VL region as depicted in SEQ ID NO: 179 or 183 of WO 2008/119567 (SEQ ID NO: 421 or 557 herein) and a VH region as depicted in SEQ ID NO: 177 or 181 of WO 2008/119567 (SEQ ID NO: 357 or 559 herein).

[0292] According to a preferred embodiment of the antibody construct of the present invention, the binding domains and in particular the second binding domain (which binds to human CD3 on the surface of a T cell) have the following format: The pairs of VH regions and VL regions are in the format of a single chain antibody (scFv). The VH and VL regions are arranged in the order VH-VL or VL-VH. It is preferred that the VH-region is positioned N-terminally of a linker sequence, and the VL-region is positioned C-terminally of the linker sequence.

[0293] A preferred embodiment of the above described antibody construct of the present invention is characterized by the second binding domain which, 568, binds to human CD3 on the surface of a T cell comprising an amino acid sequence selected from the group consisting of SEQ ID NOs: 23, 25, 41, 43, 59, 61, 77, 79, 95, 97, 113, 115, 131, 133, 149, 151, 167, 169, 185 or 187 of WO 2008/119567 (respectively, SEQ ID NO: 567, 568, 569, 570, 571, 572, 573, 574, 575, 576, 577, 578, 579, 580, 581, 582, 583, 584, 585 or 586 herein).

[0294] Hence, in one embodiment, the antibody construct of the invention comprises a polypeptide selected from the group consisting of those depicted in SEQ ID NO: 40, SEQ ID NO: 50, SEQ ID NO: 60, SEQ ID NO: 70, SEQ ID NO: 80, SEQ ID NO: 90, SEQ ID NO: 100, SEQ ID NO: 110, SEQ ID NO: 120, SEQ ID NO: 211, SEQ ID NO: 212, SEQ ID NO: 213, SEQ ID NO: 214, SEQ ID NO: 215, SEQ ID NO: 216, SEQ ID NO: 217, SEQ ID NO: 438 and SEQ ID NO: 532. These antibody constructs have a first binding domain which binds to an epitope of DLL3 which is comprised within the region as depicted in SEQ ID NO: 258.

[0295] In an alternative embodiment, the antibody construct of the invention comprises a polypeptide selected from the group consisting of those depicted in SEQ ID NO: 130, SEQ ID NO: 140, SEQ ID NO: 150, SEQ ID NO: 160, SEQ ID NO: 170; SEQ ID NO: 218, SEQ ID NO: 219, SEQ ID NO: 220, SEQ ID NO: 494, SEQ ID NO: 495, SEQ ID NO: 496, SEQ ID NO: 497, SEQ ID NO: 498, SEQ ID NO: 499, SEQ ID NO: 500, SEQ ID NO: 501, SEQ ID NO: 502, SEQ ID NO: 503, SEQ ID NO: 504, SEQ ID NO: 505, SEQ ID NO: 506, SEQ ID NO: 507, SEQ ID NO: 508, SEQ ID NO: 509, SEQ ID NO: 510, SEQ ID NO: 511, SEQ ID NO: 512, SEQ ID NO: 513, SEQ ID NO: 514, SEQ ID NO: 515, and SEQ ID NO: 516. These antibody constructs have a first binding domain which binds to an epitope of DLL3 which is comprised within the region as depicted in SEQ ID NO: 259.

[0296] Amino acid sequence modifications of the antibody constructs described herein are also contemplated. For example, it may be desirable to improve the binding affinity and/or other biological properties of the antibody construct. Amino acid sequence variants of the antibody constructs are prepared by introducing appropriate nucleotide changes into the antibody constructs nucleic acid, or by peptide synthesis. All of the below described amino acid sequence modifications should result in an antibody construct which still retains the desired biological activity (binding to DLL3 and to CD3) of the unmodified parental molecule.

[0297] The term “amino acid” or “amino acid residue” typically refers to an amino acid having its art recognized definition such as an amino acid selected from the group consisting of: alanine (Ala or A); arginine (Arg or R); asparagine (Asn or N); aspartic acid (Asp or D); cysteine (Cys or C); glutamine (Gln or Q); glutamic acid (Glu or E); glycine (Gly or G); histidine (His or H); isoleucine (He or I): leucine (Leu or L); lysine (Lys or K); methionine (Met or M); phenylalanine (Phe or F); pro line (Pro or P); serine (Ser or S); threonine (Thr or T); tryptophan (Trp or W); tyrosine (Tyr or Y); and valine (Val or V), although modified, synthetic, or rare amino acids may be used as desired. Generally, amino acids can be grouped as having a nonpolar side chain (e.g., Ala, Cys, He, Leu, Met, Phe, Pro, Val); a negatively charged side chain (e.g., Asp, Glu); a positively charged sidechain (e.g., Arg, His, Lys); or an uncharged polar side chain (e.g., Asn, Cys, Gln, Gly, His, Met, Phe, Ser, Thr, Trp, and Tyr).

[0298] Amino acid modifications include, for example, deletions from, and/or insertions into, and/or substitutions of, residues within the amino acid sequences of the antibody constructs. Any combination of deletion, insertion, and substitution is made to arrive at the final construct, provided that the final construct possesses the desired characteristics. The amino acid changes also may alter post-translational processes of the antibody constructs, such as changing the number or position of glycosylation sites.

[0299] For example, 1, 2, 3, 4, 5, or 6 amino acids may be inserted or deleted in each of the CDRs (of course, dependent on their length), while 1, 2, 3, 4, 5, 6, 7, 8, 9, 10, 11, 12, 13, 14, 15, 16, 17, 18, 19, 20, or 25 amino acids may be inserted or deleted in each of the FRs. Preferably, amino acid sequence insertions include amino- and/or carboxyl-terminal fusions ranging in length from 1, 2, 3, 4, 5, 6, 7, 8, 9 or 10 residues to polypeptides containing a hundred or more residues, as well as intra-sequence insertions of single or multiple amino acid residues. An insertional variant of the antibody construct of the invention includes the fusion to the N-terminus or to the C-terminus of the antibody construct of an enzyme or the fusion to a polypeptide which increases the serum half-life of the antibody construct.

[0300] The sites of greatest interest for substitutional mutagenesis include the CDRs of the heavy and/or light chain, in particular the hypervariable regions, but FR alterations in the heavy and/or light chain are also contemplated. The substitutions are preferably conservative substitutions as described herein. Preferably, 1, 2, 3, 4, 5, 6, 7, 8, 9, or 10 amino acids may be substituted in a CDR, while 1, 2, 3, 4, 5, 6, 7, 8, 9, 10, 11, 12, 13, 14, 15, 16, 17, 18, 19, 20, or 25 amino acids may be substituted in the framework regions (FRs), depending on the length of the CDR or FR. For example, if a CDR sequence encompasses 6 amino acids, it is envisaged that one, two or three of these amino acids are substituted. Similarly, if a CDR sequence encompasses 15 amino acids it is envisaged that one, two, three, four, five or six of these amino acids are substituted.

[0301] A useful method for identification of certain residues or regions of the antibody constructs that are preferred locations for mutagenesis is called “alanine scanning mutagenesis” as described by Cunningham and Wells in Science, 244: 1081-1085 (1989). Here, a residue or group of target residues within the antibody construct is/are identified (e.g. charged residues such as arg, asp, his, lys, and glu) and replaced by a neutral or negatively charged amino acid (most preferably alanine or polyalanine) to affect the interaction of the amino acids with the epitope.

[0302] Those amino acid locations demonstrating functional sensitivity to the substitutions are then refined by introducing further or other variants at, or for, the sites of substitution. Thus, while the site or region for introducing an amino acid sequence variation is predetermined, the nature of the mutation per se needs not to be predetermined. For example, to analyze or optimize the performance of a mutation at a given site, alanine scanning or random mutagenesis may be conducted at a target codon or region, and the expressed antibody construct variants are screened for the optimal combination of desired activity. Techniques for making substitution mutations at predetermined sites in the DNA having a known sequence are well known, for example, M13 primer mutagenesis and PCR mutagenesis. Screening of the mutants is done using assays of antigen binding activities, such as DLL3 or CD3 binding.

[0303] Generally, if amino acids are substituted in one or more or all of the CDRs of the heavy and/or light chain, it is preferred that the then-obtained “substituted” sequence is at least 60% or 65%, more preferably 70% or 75%, even more preferably 80% or 85%, and particularly preferably 90% or 95% identical to the “original” CDR sequence. This means that it is dependent of the length of the CDR to which degree it is identical to the “substituted” sequence. For example, a CDR having 5 amino acids is preferably 80% identical to its substituted sequence in order to have at least one amino acid substituted. Accordingly, the CDRs of the antibody construct may have different degrees of identity to their substituted sequences, e.g., CDRL1 may have 80%, while CDRL3 may have 90%.

[0304] Preferred substitutions (or replacements) are conservative substitutions. However, any substitution (including non-conservative substitution or one or more from the “exemplary substitutions” listed in Table 1, below) is envisaged as long as the antibody construct retains its capability to bind to DLL3 via the first binding domain and to CD3 or CD3 epsilon via the second binding domain and/or its CDRs have an identity to the then substituted sequence (at least 60% or 65%, more preferably 70% or 75%, even more preferably 80% or 85%, and particularly preferably 90% or 95% identical to the “original” CDR sequence).

[0305] Conservative substitutions are shown in Table 1 under the heading of “preferred substitutions”. If such substitutions result in a change in biological activity, then more substantial changes, denominated “exemplary substitutions” in Table 1, or as further described below in reference to amino acid classes, may be introduced and the products screened for a desired characteristic.

TABLE 1
Amino acid substitutions

| | Exemplary | Preferred |
|---|---|---|
| Original | Substitutions | Substitutions |
| Ala (A) | val, leu, ile | val |
| Arg (R) | lys, gln, asn | lys |
| Asn (N) | gln, his, asp, lys, arg | gln |
| Asp (D) | glu, asn | glu |
| Cys (C) | ser, ala | ser |
| Gln (Q) | asn, glu | asn |
| Glu (E) | asp, gln | asp |
| Gly (G) | Ala | ala |
| His (H) | asn, gln, lys, arg | arg |
| Ile (I) | leu, val, met, ala, phe | leu |
| Leu (L) | norleucine, ile, val, met, ala | ile |
| Lys (K) | arg, gln, asn | arg |
| Met (M) | leu, phe, ile | leu |
| Phe (F) | leu, val, ile, ala, tyr | tyr |
| Pro (P) | Ala | ala |
| Ser (S) | Thr | thr |
| Thr (T) | Ser | ser |
| Trp (W) | tyr, phe | tyr |
| Tyr (Y) | trp, phe, thr, ser | phe |
| Val (V) | ile, leu, met, phe, ala | leu |

[0306] Substantial modifications in the biological properties of the antibody construct of the present invention are accomplished by selecting substitutions that differ significantly in their effect on maintaining (a) the structure of the polypeptide backbone in the area of the substitution, for example, as a sheet or helical conformation, (b) the charge or hydrophobicity of the molecule at the target site, or (c) the bulk of the side chain. Naturally occurring residues are divided into groups based on common side-chain properties: (1) hydrophobic: norleucine, met, ala, val, leu, ile; (2) neutral hydrophilic: cys, ser, thr; (3) acidic: asp, glu; (4) basic: asn, gin, his, lys, arg; (5) residues that influence chain orientation: gly, pro; and (6) aromatic: trp, tyr, phe.

[0307] Non-conservative substitutions will entail exchanging a member of one of these classes for another class. Any cysteine residue not involved in maintaining the proper conformation of the antibody construct may be substituted, generally with serine, to improve the oxidative stability of the molecule and prevent aberrant crosslinking. Conversely, cysteine bond(s) may be added to the antibody to improve its stability (particularly where the antibody is an antibody fragment such as an Fv fragment).

[0308] For amino acid sequences, sequence identity and/or similarity is determined by using standard techniques known in the art, including, but not limited to, the local sequence identity algorithm of Smith and Waterman, 1981, Adv. Appl. Math. 2:482, the sequence identity alignment algorithm of Needleman and Wunsch, 1970, J. Mol. Biol. 48:443, the search for similarity method of Pearson and Lipman, 1988, Proc. Nat. Acad. Sci. U.S.A. 85:2444, computerized implementations of these algorithms (GAP, BESTFIT, FASTA, and TFASTA in the Wisconsin Genetics Software Package, Genetics Computer Group, 575 Science Drive, Madison, Wis.), the Best Fit sequence program described by Devereux et al., 1984, Nucl. Acid Res. 12:387-395, preferably using the default settings, or by inspection. Preferably, percent identity is calculated by FastDB based upon the following parameters: mismatch penalty of 1; gap penalty of 1; gap size penalty of 0.33; and joining penalty of 30, “Current Methods in Sequence Comparison and Analysis,” Macromolecule Sequencing and Synthesis, Selected Methods and Applications, pp 127-149 (1988), Alan R. Liss, Inc.

[0309] An example of a useful algorithm is PILEUP. PILEUP creates a multiple sequence alignment from a group of related sequences using progressive, pairwise alignments. It can also plot a tree showing the clustering relationships used to create the alignment. PILEUP uses a simplification of the progressive alignment method of Feng & Doolittle, 1987, J. Mol. Evol. 35:351-360; the method is similar to that described by Higgins and Sharp, 1989, CABIOS 5:151-153. Useful PILEUP parameters including a default gap weight of 3.00, a default gap length weight of 0.10, and weighted end gaps.

[0310] Another example of a useful algorithm is the BLAST algorithm, described in: Altschul et al., 1990, J. Mol. Biol. 215:403-410; Altschul et al., 1997, Nucleic Acids Res. 25:3389-3402; and Karin et al., 1993, Proc. Natl. Acad. Sci. U.S.A. 90:5873-5787. A particularly useful BLAST program is the WU-BLAST-2 program which was obtained from Altschul et al., 1996, Methods in Enzymology 266:460-480. WU-BLAST-2 uses several search parameters, most of which are set to the default values. The adjustable parameters are set with the following values: overlap span=1, overlap fraction=0.125, word threshold (T)=II. The HSP S and HSP S2 parameters are dynamic values and are established by the program itself depending upon the composition of the particular sequence and composition of the particular database against which the sequence of interest is being searched; however, the values may be adjusted to increase sensitivity.

[0311] An additional useful algorithm is gapped BLAST as reported by Altschul et al., 1993, Nucl. Acids Res. 25:3389-3402. Gapped BLAST uses BLOSUM-62 substitution scores; threshold T parameter set to 9; the two-hit method to trigger ungapped extensions, charges gap lengths of k a cost of 10+k; Xu set to 16, and Xg set to 40 for database search stage and to 67 for the output stage of the algorithms. Gapped alignments are triggered by a score corresponding to about 22 bits.

[0312] Generally, the amino acid homology, similarity, or identity between individual variant CDRs are at least 60% to the sequences depicted herein, and more typically with preferably increasing homologies or identities of at least 65% or 70%, more preferably at least 75% or 80%, even more preferably at least 85%, 90%, 91%, 92%, 93%, 94%, 95%, 96%, 97%, 98%, 99%, and almost 100%. In a similar manner, “percent (%) nucleic acid sequence identity” with respect to the nucleic acid sequence of the binding proteins identified herein is defined as the percentage of nucleotide residues in a candidate sequence that are identical with the nucleotide residues in the coding sequence of the antibody construct. A specific method utilizes the BLASTN module of WU-BLAST-2 set to the default parameters, with overlap span and overlap fraction set to 1 and 0.125, respectively.

[0313] Generally, the nucleic acid sequence homology, similarity, or identity between the nucleotide sequences encoding individual variant CDRs and the nucleotide sequences depicted herein are at least 60%, and more typically with preferably increasing homologies or identities of at least 65%, 70%, 75%, 80%, 81%, 82%, 83%, 84%, 85%, 86%, 87%, 88%, 89%, 90%, 91%, 92%, 93%, 94%, 95%, 96%, 97%, 98%, or 99%, and almost 100%. Thus, a “variant CDR” is one with the specified homology, similarity, or identity to the parent CDR of the invention, and shares biological function, including, but not limited to, at least 60%, 65%, 70%, 75%, 80%, 81%, 82%, 83%, 84%, 85%, 86%, 87%, 88%, 89%, 90%, 91%, 92%, 93%, 94%, 95%, 96%, 97%, 98%, or 99% of the specificity and/or activity of the parent CDR.

[0314] In one embodiment, the percentage of identity to human germline of the antibody constructs according to the invention is 70% or 75%, more preferably 80% or 85%, even more preferably 90%, and most preferably 91%, 92%, 93%, 94%, 95% or even 96%. See Example 7. Identity to human antibody germline gene products is thought to be an important feature to reduce the risk of therapeutic proteins to elicit an immune response against the drug in the patient during treatment. Hwang & Foote (“Immunogenicity of engineered antibodies”; Methods 36 (2005) 3-10) demonstrate that the reduction of non-human portions of drug antibody constructs leads to a decrease of risk to induce anti-drug antibodies in the patients during treatment. By comparing an exhaustive number of clinically evaluated antibody drugs and the respective immunogenicity data, the trend is shown that humanization of the V-regions of antibodies makes the protein less immunogenic (average 5.1% of patients) than antibodies carrying unaltered non-human V regions (average 23.59% of patients). A higher degree of identity to human sequences is hence desirable for V-region based protein therapeutics in the form of antibody constructs. For this purpose of determining the germline identity, the V-regions of VL can be aligned with the amino acid sequences of human germline V segments and J segments (http://vbase.mrc-cpe.cam.ac.uk/) using Vector NTI software and the amino acid sequence calculated by dividing the identical amino acid residues by the total number of amino acid residues of the VL in percent. The same can be for the VH segments (http://vbase.mrc-cpe.cam.ac.uk/) with the exception that the VH CDR3 may be excluded due to its high diversity and a lack of existing human germline VH CDR3 alignment partners. Recombinant techniques can then be used to increase sequence identity to human antibody germline genes.

[0315] In a further embodiment, the bispecific antibody constructs of the present invention exhibit high monomer yields under standard research scale conditions, e.g., in a standard two-step purification process. Preferably the monomer yield of the antibody constructs according to the invention is 0.25 mg/L supernatant, more preferably 0.5 mg/L, even more preferably −1 mg/L, and most preferably 3 mg/L supernatant.

[0316] Likewise, the yield of the dimeric antibody construct isoforms and hence the monomer percentage (i.e., monomer:(monomer+dimer)) of the antibody constructs can be determined. The productivity of monomeric and dimeric antibody constructs and the calculated monomer percentage can e.g. be obtained in the SEC purification step of culture supernatant from standardized research-scale production in roller bottles. In one embodiment, the monomer percentage of the antibody constructs is ≥80%, more preferably ≥85%, even more preferably ≥90%, and most preferably ≥95%.

[0317] In one embodiment, the antibody constructs have a preferred plasma stability (ratio of EC50 with plasma to EC50 w/o plasma) of ≤5 or ≤4, more preferably ≤3.5 or ≤3, even more preferably ≤2.5 or ≤2, and most preferably ≤1.5 or ≤1. The plasma stability of an antibody construct can be tested by incubation of the construct in human plasma at 37° C. for 24 hours followed by EC50 determination in a 51-chromium release cytotoxicity assay. The effector cells in the cytotoxicity assay can be stimulated enriched human CD8 positive T cells. Target cells can e.g. be CHO cells transfected with human DLL3. The effector to target cell (E:T) ratio can be chosen as 10:1. The human plasma pool used for this purpose is derived from the blood of healthy donors collected by EDTA coated syringes. Cellular components are removed by centrifugation and the upper plasma phase is collected and subsequently pooled. As control, antibody constructs are diluted immediately prior to the cytotoxicity assay in RPMI-1640 medium. The plasma stability is calculated as ratio of EC50 (after plasma incubation) to EC50 (control). See Example 11.

[0318] It is furthermore preferred that the monomer to dimer conversion of antibody constructs of the invention is low. The conversion can be measured under different conditions and analyzed by high performance size exclusion chromatography. See Example 9. For example, incubation of the monomeric isoforms of the antibody constructs can be carried out for 7 days at 37° C. and concentrations of e.g. 100 pg/ml or 250 pg/ml in an incubator. Under these conditions, it is preferred that the antibody constructs of the invention show a dimer percentage that is ≤5%, more preferably ≤4%, even more preferably ≤3%, even more preferably ≤2.5%, even more preferably ≤2%, even more preferably ≤1.5%, and most preferably ≤1% or ≤0.5% or even 0%.

[0319] It is also preferred that the bispecific antibody constructs of the present invention present with very low dimer conversion after a number of freeze/thaw cycles. For example, the antibody construct monomer is adjusted to a concentration of 250 pg/ml e.g. in generic formulation buffer and subjected to three freeze/thaw cycles (freezing at −80° C. for 30 min followed by thawing for 30 min at room temperature), followed by high performance SEC to determine the percentage of initially monomeric antibody construct, which had been converted into dimeric antibody construct. Preferably the dimer percentages of the bispecific antibody constructs are ≤5%, more preferably ≤4%, even more preferably ≤3%, even more preferably ≤2.5%, even more preferably ≤2%, even more preferably ≤1.5%, and most preferably ≤1% or even ≤0.5%, for example after three freeze/thaw cycles.

[0320] The bispecific antibody constructs of the present invention preferably show a favorable thermostability with aggregation temperatures ≥45° C. or ≥50° C., more preferably ≥52° C. or ≥54° C., even more preferably ≥56° C. or ≥57° C., and most preferably ≥58° C. or ≥59° C. The thermostability parameter can be determined in terms of antibody aggregation temperature as follows: Antibody solution at a concentration 250 μg/ml is transferred into a single use cuvette and placed in a Dynamic Light Scattering (DLS) device. The sample is heated from 40° C. to 70° C. at a heating rate of 0.5° C./min with constant acquisition of the measured radius. Increase of radius indicating melting of the protein and aggregation is used to calculate the aggregation temperature of the antibody. See Example 10.

[0321] Alternatively, temperature melting curves can be determined by Differential Scanning calorimetry (DSC) to determine intrinsic biophysical protein stabilities of the antibody constructs. These experiments are performed using a MicroCal LLC (Northampton, Mass., U.S.A) VP-DSC device. The energy uptake of a sample containing an antibody construct is recorded from 20° C. to 90° C. compared to a sample containing only the formulation buffer. The antibody constructs are adjusted to a final concentration of 250 pg/ml e.g. in SEC running buffer. For recording of the respective melting curve, the overall sample temperature is increased stepwise. At each temperature T energy uptake of the sample and the formulation buffer reference is recorded. The difference in energy uptake Cp (kcal/mole/° C.) of the sample minus the reference is plotted against the respective temperature. The melting temperature is defined as the temperature at the first maximum of energy uptake.

[0322] It is furthermore envisaged that the DLL3×CD3 bispecific antibody constructs of the invention do not cross-react with (i.e., do not essentially bind to) the human DLL3 paralogues DLL1 and/or DLL4. Furthermore, it is envisaged that the DLL3×CD3 bispecific antibody constructs of the invention do not cross-react with (i.e., do not essentially bind to) the macaque/cyno DLL3 paralogues DLL1 and/or DLL4. See Example 6.

[0323] The DLL3×CD3 bispecific antibody constructs of the invention are also envisaged to have a turbidity (as measured by OD340 after concentration of purified monomeric antibody construct to 2.5 mg/ml and over night incubation) of ≤0.2, preferably of ≤0.15, more preferably of ≤0.12, even more preferably of ≤0.1, and most preferably of ≤0.08. See Example 12.

[0324] The DLL3×CD3 bispecific antibody constructs of the invention are also envisaged to not be internalized or to not undergo significant internalization by the target cell. The rate of internalization can be assayed e.g. as described in Example 16. Preferably, the internalization rate (e.g. measured as a decrease in cytotoxicity) is ≤20% after a 2 hour (pre-)incubation of the antibody construct with the target cell, more preferably ≤15%, even more preferably ≤10%, and most preferably ≤5%.

[0325] It is furthermore envisaged that shed or soluble DLL3 does not significantly impair the efficacy or biologic activity of the DLL3×CD3 bispecific antibody constructs of the invention. This can be measured e.g. in a cytotoxicity assay where soluble DLL3 is added at increasing concentrations to the assay, e.g. at 0 nM-0.3 nM-0.7 nM-1 nM-3 nM-7 nM-12 nM. The EC50 value of the tested antibody construct should not be significantly increased in the presence of soluble DLL3. See Example 17.

[0326] In a further embodiment the antibody construct according to the invention is stable at acidic pH. The more tolerant the antibody construct behaves at unphysiologic pH such as pH 5.5 (a pH which is required to run e.g. a cation exchange chromatography), the higher is the recovery of the antibody construct eluted from an ion exchange column relative to the total amount of loaded protein. Recovery of the antibody construct from an ion (e.g., cation) exchange column at pH 5.5 is preferably ≥30%, more preferably ≥40%, more preferably ≥50%, even more preferably ≥60%, even more preferably ≥70%, even more preferably ≥80%, even more preferably ≥90%, even more preferably ≥95%, and most preferably ≥99%. See Example 13.

[0327] It is furthermore envisaged that the bispecific antibody constructs of the present invention exhibit therapeutic efficacy or anti-tumor activity. This can e.g. be assessed in a study as disclosed in the following example of an advanced stage human tumor xenograft model:

[0328] On day 1 of the study, 5×10⁶ cells of a human DLL3 positive cancer cell line (e.g. SHP-77) are subcutaneously injected in the right dorsal flank of female NOD/SCID mice. When the mean tumor volume reaches about 100 mm³, in vitro expanded human CD3 positive T cells are transplanted into the mice by injection of about 2×10⁷ cells into the peritoneal cavity of the animals. Mice of vehicle control group 1 do not receive effector cells and are used as an untransplanted control for comparison with vehicle control group 2 (receiving effector cells) to monitor the impact of T cells alone on tumor growth. The antibody treatment starts when the mean tumor volume reaches about 200 mm³. The mean tumor size of each treatment group on the day of treatment start should not be statistically different from any other group (analysis of variance). Mice are treated with 0.5 mg/kg/day of a DLL3×CD3 bispecifc antibody construct by intravenous bolus injection for about 15 to 20 days. Tumors are measured by caliper during the study and progress evaluated by intergroup comparison of tumor volumes (TV). The tumor growth inhibition T/C [%] is determined by calculating TV as T/C %=100×(median TV of analyzed group)/(median TV of control group 2).

[0329] The skilled person knows how to modify or adapt certain parameters of this study, such as the number of injected tumor cells, the site of injection, the number of transplanted human T cells, the amount of bispecific antibody constructs to be administered, and the timelines, while still arriving at a meaningful and reproducible result. Preferably, the tumor growth inhibition T/C [%] is ≤70 or ≤60, more preferably ≤50 or ≤40, even more preferably ≤30 or ≤20 and most preferably ≤10 or ≤5 or even ≤2.5.

[0330] The invention further provides a polynucleotide/nucleic acid molecule encoding an antibody construct of the invention.

[0331] A polynucleotide is a biopolymer composed of 13 or more nucleotide monomers covalently bonded in a chain. DNA (such as cDNA) and RNA (such as mRNA) are examples of polynucleotides with distinct biological function. Nucleotides are organic molecules that serve as the monomers or subunits of nucleic acid molecules like DNA or RNA. The nucleic acid molecule or polynucleotide can be double stranded and single stranded, linear and circular. It is preferably comprised in a vector which is preferably comprised in a host cell. Said host cell is, e.g. after transformation or transfection with the vector or the polynucleotide of the invention, capable of expressing the antibody construct. For that purpose the polynucleotide or nucleic acid molecule is operatively linked with control sequences.

[0332] The genetic code is the set of rules by which information encoded within genetic material (nucleic acids) is translated into proteins. Biological decoding in living cells is accomplished by the ribosome which links amino acids in an order specified by mRNA, using tRNA molecules to carry amino acids and to read the mRNA three nucleotides at a time. The code defines how sequences of these nucleotide triplets, called codons, specify which amino acid will be added next during protein synthesis. With some exceptions, a three-nucleotide codon in a nucleic acid sequence specifies a single amino acid. Because the vast majority of genes are encoded with exactly the same code, this particular code is often referred to as the canonical or standard genetic code. While the genetic code determines the protein sequence for a given coding region, other genomic regions can influence when and where these proteins are produced.

[0333] Furthermore, the invention provides a vector comprising a polynucleotide/nucleic acid molecule of the invention.

[0334] A vector is a nucleic acid molecule used as a vehicle to transfer (foreign) genetic material into a cell. The term “vector” encompasses—but is not restricted to—plasmids, viruses, cosmids and artificial chromosomes. In general, engineered vectors comprise an origin of replication, a multicloning site and a selectable marker. The vector itself is generally a nucleotide sequence, commonly a DNA sequence, that comprises an insert (transgene) and a larger sequence that serves as the “backbone” of the vector. Modern vectors may encompass additional features besides the transgene insert and a backbone: promoter, genetic marker, antibiotic resistance, reporter gene, targeting sequence, protein purification tag. Vectors called expression vectors (expression constructs) specifically are for the expression of the transgene in the target cell, and generally have control sequences.

[0335] The term “control sequences” refers to DNA sequences necessary for the expression of an operably linked coding sequence in a particular host organism. The control sequences that are suitable for prokaryotes, for example, include a promoter, optionally an operator sequence, and a ribosome binding site. Eukaryotic cells are known to utilize promoters, polyadenylation signals, and enhancers.

[0336] A nucleic acid is “operably linked” when it is placed into a functional relationship with another nucleic acid sequence. For example, DNA for a presequence or secretory leader is operably linked to DNA for a polypeptide if it is expressed as a preprotein that participates in the secretion of the polypeptide; a promoter or enhancer is operably linked to a coding sequence if it affects the transcription of the sequence; or a ribosome binding site is operably linked to a coding sequence if it is positioned so as to facilitate translation. Generally, “operably linked” means that the DNA sequences being linked are contiguous, and, in the case of a secretory leader, contiguous and in reading phase. However, enhancers do not have to be contiguous. Linking is accomplished by ligation at convenient restriction sites. If such sites do not exist, the synthetic oligonucleotide adaptors or linkers are used in accordance with conventional practice.

[0337] “Transfection” is the process of deliberately introducing nucleic acid molecules or polynucleotides (including vectors) into target cells. The term is mostly used for non-viral methods in eukaryotic cells. Transduction is often used to describe virus-mediated transfer of nucleic acid molecules or polynucleotides. Transfection of animal cells typically involves opening transient pores or “holes” in the cell membrane, to allow the uptake of material. Transfection can be carried out using calcium phosphate, by electroporation, by cell squeezing or by mixing a cationic lipid with the material to produce liposomes, which fuse with the cell membrane and deposit their cargo inside.

[0338] The term “transformation” is used to describe non-viral transfer of nucleic acid molecules or polynucleotides (including vectors) into bacteria, and also into non-animal eukaryotic cells, including plant cells. Transformation is hence the genetic alteration of a bacterial or non-animal eukaryotic cell resulting from the direct uptake through the cell membrane(s) from its surroundings and subsequent incorporation of exogenous genetic material (nucleic acid molecules). Transformation can be effected by artificial means. For transformation to happen, cells or bacteria must be in a state of competence, which might occur as a time-limited response to environmental conditions such as starvation and cell density.

[0339] Moreover, the invention provides a host cell transformed or transfected with the polynucleotide/nucleic acid molecule or with the vector of the invention.

[0340] As used herein, the terms “host cell” or “recipient cell” are intended to include any individual cell or cell culture that can be or has/have been recipients of vectors, exogenous nucleic acid molecules, and polynucleotides encoding the antibody construct of the present invention; and/or recipients of the antibody construct itself. The introduction of the respective material into the cell is carried out by way of transformation, transfection and the like. The term “host cell” is also intended to include progeny or potential progeny of a single cell. Because certain modifications may occur in succeeding generations due to either natural, accidental, or deliberate mutation or due to environmental influences, such progeny may not, in fact, be completely identical (in morphology or in genomic or total DNA complement) to the parent cell, but is still included within the scope of the term as used herein. Suitable host cells include prokaryotic or eukaryotic cells, and also include but are not limited to bacteria, yeast cells, fungi cells, plant cells, and animal cells such as insect cells and mammalian cells, e.g., murine, rat, macaque or human.

[0341] The antibody construct of the invention can be produced in bacteria. After expression, the antibody construct of the invention is isolated from the E. coli cell paste in a soluble fraction and can be purified through, e.g., affinity chromatography and/or size exclusion. Final purification can be carried out similar to the process for purifying antibody expressed e.g., in CHO cells.

[0342] In addition to prokaryotes, eukaryotic microbes such as filamentous fungi or yeast are suitable cloning or expression hosts for the antibody construct of the invention. Saccharomyces cerevisiae, or common baker's yeast, is the most commonly used among lower eukaryotic host microorganisms. However, a number of other genera, species, and strains are commonly available and useful herein, such as Schizosaccharomyces pombe, Kluyveromyces hosts such as K. lactis, K. fragilis (ATCC 12424), K. bulgaricus (ATCC 16045), K. wickeramii (ATCC 24178), K. waltii (ATCC 56500), K. drosophilarum (ATCC 36906), K. thermotolerans, and K. marxianus; yarrowia (EP 402 226); Pichia pastoris (EP 183 070); Candida; Trichoderma reesia (EP 244 234); Neurospora crassa; Schwanniomyces such as Schwanniomyces occidentalis; and filamentous fungi such as Neurospora, Penicillium, Tolypocladium, and Aspergillus hosts such as A. nidulans and A. niger.

[0343] Suitable host cells for the expression of glycosylated antibody construct of the invention are derived from multicellular organisms. Examples of invertebrate cells include plant and insect cells. Numerous baculoviral strains and variants and corresponding permissive insect host cells from hosts such as Spodoptera frugiperda (caterpillar), Aedes aegypti (mosquito), Aedes albopictus (mosquito), Drosophila melanogaster (fruit fly), and Bombyx mori have been identified. A variety of viral strains for transfection are publicly available, e.g., the L-1 variant of Autographa californica NPV and the Bm-5 strain of Bombyx mori NPV, and such viruses may be used as the virus herein according to the present invention, particularly for transfection of Spodoptera frugiperda cells.

[0344] Plant cell cultures of cotton, corn, potato, soybean, petunia, tomato, Arabidopsis and tobacco can also be used as hosts. Cloning and expression vectors useful in the production of proteins in plant cell culture are known to those of skill in the art. See e.g. Hiatt et al., Nature (1989) 342: 76-78, Owen et al. (1992) Bio/Technology 10: 790-794, Artsaenko et al. (1995) The Plant J 8: 745-750, and Fecker et al. (1996) Plant Mol Biol 32: 979-986.

[0345] However, interest has been greatest in vertebrate cells, and propagation of vertebrate cells in culture (tissue culture) has become a routine procedure. Examples of useful mammalian host cell lines are monkey kidney CV1 line transformed by SV40 (COS-7, ATCC CRL 1651); human embryonic kidney line (293 or 293 cells subcloned for growth in suspension culture, Graham et al., J. Gen Virol. 36: 59 (1977)); baby hamster kidney cells (BHK, ATCC CCL 10); Chinese hamster ovary cells/-DHFR (CHO, Urlaub et al., Proc. Natl. Acad. Sci. USA 77: 4216 (1980)); mouse sertoli cells (TM4, Mather, Biol. Reprod. 23: 243-251 (1980)); monkey kidney cells (CVI ATCC CCL 70); African green monkey kidney cells (VERO-76, ATCC CRL1587); human cervical carcinoma cells (HELA, ATCC CCL 2); canine kidney cells (MDCK, ATCC CCL 34); buffalo rat liver cells (BRL 3A, ATCC CRL 1442); human lung cells (W138, ATCC CCL 75); human liver cells (Hep G2,1413 8065); mouse mammary tumor (MMT 060562, ATCC CCLS 1); TRI cells (Mather et al., Annals N. Y Acad. Sci. (1982) 383: 44-68); MRC 5 cells; FS4 cells; and a human hepatoma line (Hep G2).

[0346] In a further embodiment the invention provides a process for the production of an antibody construct of the invention, said process comprising culturing a host cell of the invention under conditions allowing the expression of the antibody construct of the invention and recovering the produced antibody construct from the culture.

[0347] As used herein, the term “culturing” refers to the in vitro maintenance, differentiation, growth, proliferation and/or propagation of cells under suitable conditions in a medium. The term “expression” includes any step involved in the production of an antibody construct of the invention including, but not limited to, transcription, post-transcriptional modification, translation, post-translational modification, and secretion.

[0348] When using recombinant techniques, the antibody construct can be produced intracellularly, in the periplasmic space, or directly secreted into the medium. If the antibody construct is produced intracellularly, as a first step, the particulate debris, either host cells or lysed fragments, are removed, for example, by centrifugation or ultrafiltration. Carter et al., Bio/Technology 10: 163-167 (1992) describe a procedure for isolating antibodies which are secreted to the periplasmic space of E. coli. Briefly, cell paste is thawed in the presence of sodium acetate (pH 3.5), EDTA, and phenylmethylsulfonylfluoride (PMSF) over about 30 min. Cell debris can be removed by centrifugation. Where the antibody is secreted into the medium, supernatants from such expression systems are generally first concentrated using a commercially available protein concentration filter, for example, an Amicon or Millipore Pellicon ultrafiltration unit. A protease inhibitor such as PMSF may be included in any of the foregoing steps to inhibit proteolysis and antibiotics may be included to prevent the growth of adventitious contaminants.

[0349] The antibody construct of the invention prepared from the host cells can be recovered or purified using, for example, hydroxylapatite chromatography, gel electrophoresis, dialysis, and affinity chromatography. Other techniques for protein purification such as fractionation on an ion-exchange column, ethanol precipitation, Reverse Phase HPLC, chromatography on silica, chromatography on heparin SEPHAROSE™, chromatography on an anion or cation exchange resin (such as a polyaspartic acid column), chromato-focusing, SDS-PAGE, and ammonium sulfate precipitation are also available depending on the antibody to be recovered. Where the antibody construct of the invention comprises a CH3 domain, the Bakerbond ABX resin (J. T. Baker, Phillipsburg, N.J.) is useful for purification.

[0350] Affinity chromatography is a preferred purification technique. The matrix to which the affinity ligand is attached is most often agarose, but other matrices are available. Mechanically stable matrices such as controlled pore glass or poly (styrenedivinyl) benzene allow for faster flow rates and shorter processing times than can be achieved with agarose.

[0351] Moreover, the invention provides a pharmaceutical composition comprising an antibody construct of the invention or an antibody construct produced according to the process of the invention.

[0352] As used herein, the term “pharmaceutical composition” relates to a composition which is suitable for administration to a patient, preferably a human patient. The particularly preferred pharmaceutical composition of this invention comprises one or a plurality of the antibody construct(s) of the invention, preferably in a therapeutically effective amount. Preferably, the pharmaceutical composition further comprises suitable formulations of one or more (pharmaceutically effective) carriers, stabilizers, excipients, diluents, solubilizers, surfactants, emulsifiers, preservatives and/or adjuvants. Acceptable constituents of the composition are preferably nontoxic to recipients at the dosages and concentrations employed. Pharmaceutical compositions of the invention include, but are not limited to, liquid, frozen, and lyophilized compositions.

[0353] The inventive compositions may comprise a pharmaceutically acceptable carrier. In general, as used herein, “pharmaceutically acceptable carrier” means any and all aqueous and non-aqueous solutions, sterile solutions, solvents, buffers, e.g. phosphate buffered saline (PBS) solutions, water, suspensions, emulsions, such as oil/water emulsions, various types of wetting agents, liposomes, dispersion media and coatings, which are compatible with pharmaceutical administration, in particular with parenteral administration. The use of such media and agents in pharmaceutical compositions is well known in the art, and the compositions comprising such carriers can be formulated by well-known conventional methods.

[0354] Certain embodiments provide pharmaceutical compositions comprising the antibody construct of the invention and further one or more excipients such as those illustratively described in this section and elsewhere herein. Excipients can be used in the invention in this regard for a wide variety of purposes, such as adjusting physical, chemical, or biological properties of formulations, such as adjustment of viscosity, and or processes of the invention to improve effectiveness and or to stabilize such formulations and processes against degradation and spoilage due to, for instance, stresses that occur during manufacturing, shipping, storage, pre-use preparation, administration, and thereafter.

[0355] In certain embodiments, the pharmaceutical composition may contain formulation materials for the purpose of modifying, maintaining or preserving, e.g., the pH, osmolarity, viscosity, clarity, color, isotonicity, odor, sterility, stability, rate of dissolution or release, adsorption or penetration of the composition (see, REMINGTON'S PHARMACEUTICAL SCIENCES, 18″ Edition, (A. R. Genrmo, ed.), 1990, Mack Publishing Company). In such embodiments, suitable formulation materials may include, but are not limited to:

[0356] amino acids such as glycine, alanine, glutamine, asparagine, threonine, proline, 2-phenylalanine, including charged amino acids, preferably lysine, lysine acetate, arginine, glutamate and/or histidine

[0357] antimicrobials such as antibacterial and antifungal agents

[0358] antioxidants such as ascorbic acid, methionine, sodium sulfite or sodium hydrogen-sulfite;

[0359] buffers, buffer systems and buffering agents which are used to maintain the composition at physiological pH or at a slightly lower pH, typically within a pH range of from about 5 to about 8 or 9; examples of buffers are borate, bicarbonate, Tris-HCl, citrates, phosphates or other organic acids, succinate, phosphate, histidine and acetate; for example Tris buffer of about pH 7.0-8.5, or acetate buffer of about pH 4.0-5.5;

[0360] non-aqueous solvents such as propylene glycol, polyethylene glycol, vegetable oils such as olive oil, and injectable organic esters such as ethyl oleate;

[0361] aqueous carriers including water, alcoholic/aqueous solutions, emulsions or suspensions, including saline and buffered media;

[0362] biodegradable polymers such as polyesters;

[0363] bulking agents such as mannitol or glycine;

[0364] chelating agents such as ethylenediamine tetraacetic acid (EDTA);

[0365] isotonic and absorption delaying agents;

[0366] complexing agents such as caffeine, polyvinylpyrrolidone, beta-cyclodextrin or hydroxypropyl-beta-cyclodextrin)

[0367] fillers;

[0368] monosaccharides; disaccharides; and other carbohydrates (such as glucose, mannose or dextrins); carbohydrates may be non-reducing sugars, preferably trehalose, sucrose, octasulfate, sorbitol or xylitol;

[0369] (low molecular weight) proteins, polypeptides or proteinaceous carriers such as human or bovine serum albumin, gelatin or immunoglobulins, preferably of human origin;

[0370] coloring and flavouring agents;

[0371] sulfur containing reducing agents, such as glutathione, thioctic acid, sodium thioglycolate, thioglycerol, [alpha]-monothioglycerol, and sodium thio sulfate

[0372] diluting agents;

[0373] emulsifying agents;

[0374] hydrophilic polymers such as polyvinylpyrrolidone)

[0375] salt-forming counter-ions such as sodium;

[0376] preservatives such as antimicrobials, anti-oxidants, chelating agents, inert gases and the like; examples are: benzalkonium chloride, benzoic acid, salicylic acid, thimerosal, phenethyl alcohol, methylparaben, propylparaben, chlorhexidine, sorbic acid or hydrogen peroxide);

[0377] metal complexes such as Zn-protein complexes;

[0378] solvents and co-solvents (such as glycerin, propylene glycol or polyethylene glycol);

[0379] sugars and sugar alcohols, such as trehalose, sucrose, octasulfate, mannitol, sorbitol or xylitol stachyose, mannose, sorbose, xylose, ribose, myoinisitose, galactose, lactitol, ribitol, myoinisitol, galactitol, glycerol, cyclitols (e.g., inositol), polyethylene glycol; and polyhydric sugar alcohols;

[0380] suspending agents;

[0381] surfactants or wetting agents such as pluronics, PEG, sorbitan esters, polysorbates such as polysorbate 20, polysorbate, triton, tromethamine, lecithin, cholesterol, tyloxapal; surfactants may be detergents, preferably with a molecular weight of >1.2 KD and/or a polyether, preferably with a molecular weight of >3 KD; non-limiting examples for preferred detergents are Tween 20, Tween 40, Tween 60, Tween 80 and Tween 85; non-limiting examples for preferred polyethers are PEG 3000, PEG 3350, PEG 4000 and PEG 5000;

[0382] stability enhancing agents such as sucrose or sorbitol;

[0383] tonicity enhancing agents such as alkali metal halides, preferably sodium or potassium chloride, mannitol sorbitol;

[0384] parenteral delivery vehicles including sodium chloride solution, Ringer's dextrose, dextrose and sodium chloride, lactated Ringer's, or fixed oils;

[0385] intravenous delivery vehicles including fluid and nutrient replenishers, electrolyte replenishers (such as those based on Ringer's dextrose).

[0386] It is evident to those skilled in the art that the different constituents of the pharmaceutical composition (e.g., those listed above) can have different effects, for example, and amino acid can act as a buffer, a stabilizer and/or an antioxidant; mannitol can act as a bulking agent and/or a tonicity enhancing agent; sodium chloride can act as delivery vehicle and/or tonicity enhancing agent; etc.

[0387] It is envisaged that the composition of the invention might comprise, in addition to the polypeptide of the invention defined herein, further biologically active agents, depending on the intended use of the composition. Such agents might be drugs acting on the gastro-intestinal system, drugs acting as cytostatica, drugs preventing hyperurikemia, drugs inhibiting immunoreactions (e.g. corticosteroids), drugs modulating the inflammatory response, drugs acting on the circulatory system and/or agents such as cytokines known in the art. It is also envisaged that the antibody construct of the present invention is applied in a co-therapy, i.e., in combination with another anti-cancer medicament.

[0388] In certain embodiments, the optimal pharmaceutical composition will be determined by one skilled in the art depending upon, for example, the intended route of administration, delivery format and desired dosage. See, for example, REMINGTON'S PHARMACEUTICAL SCIENCES, supra. In certain embodiments, such compositions may influence the physical state, stability, rate of in vivo release and rate of in vivo clearance of the antibody construct of the invention. In certain embodiments, the primary vehicle or carrier in a pharmaceutical composition may be either aqueous or non-aqueous in nature. For example, a suitable vehicle or carrier may be water for injection, physiological saline solution or artificial cerebrospinal fluid, possibly supplemented with other materials common in compositions for parenteral administration. Neutral buffered saline or saline mixed with serum albumin are further exemplary vehicles. In certain embodiments, the antibody construct of the invention compositions may be prepared for storage by mixing the selected composition having the desired degree of purity with optional formulation agents (REMINGTON'S PHARMACEUTICAL SCIENCES, supra) in the form of a lyophilized cake or an aqueous solution. Further, in certain embodiments, the antibody construct of the invention may be formulated as a lyophilizate using appropriate excipients such as sucrose.

[0389] When parenteral administration is contemplated, the therapeutic compositions for use in this invention may be provided in the form of a pyrogen-free, parenterally acceptable aqueous solution comprising the desired antibody construct of the invention in a pharmaceutically acceptable vehicle. A particularly suitable vehicle for parenteral injection is sterile distilled water in which the antibody construct of the invention is formulated as a sterile, isotonic solution, properly preserved. In certain embodiments, the preparation can involve the formulation of the desired molecule with an agent, such as injectable microspheres, bio-erodible particles, polymeric compounds (such as polylactic acid or polyglycolic acid), beads or liposomes, that may provide controlled or sustained release of the product which can be delivered via depot injection. In certain embodiments, hyaluronic acid may also be used, having the effect of promoting sustained duration in the circulation. In certain embodiments, implantable drug delivery devices may be used to introduce the desired antibody construct.

[0390] Additional pharmaceutical compositions will be evident to those skilled in the art, including formulations involving the antibody construct of the invention in sustained- or controlled-delivery/release formulations. Techniques for formulating a variety of other sustained- or controlled-delivery means, such as liposome carriers, bio-erodible microparticles or porous beads and depot injections, are also known to those skilled in the art. See, for example, International Patent Application No. PCT/US93/00829, which describes controlled release of porous polymeric microparticles for delivery of pharmaceutical compositions. Sustained-release preparations may include semipermeable polymer matrices in the form of shaped articles, e.g., films, or microcapsules. Sustained release matrices may include polyesters, hydrogels, polylactides (as disclosed in U.S. Pat. No. 3,773,919 and European Patent Application Publication No. EP 058481), copolymers of L-glutamic acid and gamma ethyl-L-glutamate (Sidman et al., 1983, Biopolymers 2:547-556), poly (2-hydroxyethyl-methacrylate) (Langer et al., 1981, J. Biomed. Mater. Res. 15:167-277 and Langer, 1982, Chem. Tech. 12:98-105), ethylene vinyl acetate (Langer et al., 1981, supra) or poly-D(−)-3-hydroxybutyric acid (European Patent Application Publication No. EP 133,988). Sustained release compositions may also include liposomes that can be prepared by any of several methods known in the art. See, e.g., Eppstein et al., 1985, Proc. Natl. Acad. Sci. U.S.A. 82:3688-3692; European Patent Application Publication Nos. EP 036,676; EP 088,046 and EP 143,949.

[0391] The antibody construct may also be entrapped in microcapsules prepared, for example, by coacervation techniques or by interfacial polymerization (for example, hydroxymethylcellulose or gelatine-microcapsules and poly (methylmethacylate) microcapsules, respectively), in colloidal drug delivery systems (for example, liposomes, albumin microspheres, microemulsions, nanoparticles and nanocapsules), or in macroemulsions. Such techniques are disclosed in Remington's Pharmaceutical Sciences, 16th edition, Oslo, A., Ed., (1980).

[0392] Pharmaceutical compositions used for in vivo administration are typically provided as sterile preparations. Sterilization can be accomplished by filtration through sterile filtration membranes. When the composition is lyophilized, sterilization using this method may be conducted either prior to or following lyophilization and reconstitution. Compositions for parenteral administration can be stored in lyophilized form or in a solution. Parenteral compositions generally are placed into a container having a sterile access port, for example, an intravenous solution bag or vial having a stopper pierceable by a hypodermic injection needle.

[0393] Another aspect of the invention includes self-buffering antibody construct of the invention formulations, which can be used as pharmaceutical compositions, as described in international patent application WO 06138181A2 (PCT/US2006/022599). A variety of expositions are available on protein stabilization and formulation materials and methods useful in this regard, such as Arakawa et al., “Solvent interactions in pharmaceutical formulations,” Pharm Res. 8(3): 285-91 (1991); Kendrick et al., “Physical stabilization of proteins in aqueous solution” in: RATIONAL DESIGN OF STABLE PROTEIN FORMULATIONS: THEORY AND PRACTICE, Carpenter and Manning, eds. Pharmaceutical Biotechnology. 13: 61-84 (2002), and Randolph et al., “Surfactant-protein interactions”, Pharm Biotechnol. 13: 159-75 (2002), see particularly the parts pertinent to excipients and processes of the same for self-buffering protein formulations in accordance with the current invention, especially as to protein pharmaceutical products and processes for veterinary and/or human medical uses.

[0394] Salts may be used in accordance with certain embodiments of the invention to, for example, adjust the ionic strength and/or the isotonicity of a formulation and/or to improve the solubility and/or physical stability of a protein or other ingredient of a composition in accordance with the invention. As is well known, ions can stabilize the native state of proteins by binding to charged residues on the protein's surface and by shielding charged and polar groups in the protein and reducing the strength of their electrostatic interactions, attractive, and repulsive interactions. Ions also can stabilize the denatured state of a protein by binding to, in particular, the denatured peptide linkages (—CONH) of the protein. Furthermore, ionic interaction with charged and polar groups in a protein also can reduce intermolecular electrostatic interactions and, thereby, prevent or reduce protein aggregation and insolubility.

[0395] Ionic species differ significantly in their effects on proteins. A number of categorical rankings of ions and their effects on proteins have been developed that can be used in formulating pharmaceutical compositions in accordance with the invention. One example is the Hofmeister series, which ranks ionic and polar non-ionic solutes by their effect on the conformational stability of proteins in solution. Stabilizing solutes are referred to as “kosmotropic”. Destabilizing solutes are referred to as “chaotropic”. Kosmotropes commonly are used at high concentrations (e.g., >1 molar ammonium sulfate) to precipitate proteins from solution (“salting-out”). Chaotropes commonly are used to denture and/or to solubilize proteins (“salting-in”). The relative effectiveness of ions to “salt-in” and “salt-out” defines their position in the Hofmeister series.

[0396] Free amino acids can be used in the antibody construct of the invention formulations in accordance with various embodiments of the invention as bulking agents, stabilizers, and antioxidants, as well as other standard uses. Lysine, proline, serine, and alanine can be used for stabilizing proteins in a formulation. Glycine is useful in lyophilization to ensure correct cake structure and properties. Arginine may be useful to inhibit protein aggregation, in both liquid and lyophilized formulations. Methionine is useful as an antioxidant.

[0397] Polyols include sugars, e.g., mannitol, sucrose, and sorbitol and polyhydric alcohols such as, for instance, glycerol and propylene glycol, and, for purposes of discussion herein, polyethylene glycol (PEG) and related substances. Polyols are kosmotropic. They are useful stabilizing agents in both liquid and lyophilized formulations to protect proteins from physical and chemical degradation processes. Polyols also are useful for adjusting the tonicity of formulations. Among polyols useful in select embodiments of the invention is mannitol, commonly used to ensure structural stability of the cake in lyophilized formulations. It ensures structural stability to the cake. It is generally used with a lyoprotectant, e.g., sucrose. Sorbitol and sucrose are among preferred agents for adjusting tonicity and as stabilizers to protect against freeze-thaw stresses during transport or the preparation of bulks during the manufacturing process. Reducing sugars (which contain free aldehyde or ketone groups), such as glucose and lactose, can glycate surface lysine and arginine residues. Therefore, they generally are not among preferred polyols for use in accordance with the invention. In addition, sugars that form such reactive species, such as sucrose, which is hydrolyzed to fructose and glucose under acidic conditions, and consequently engenders glycation, also is not among preferred polyols of the invention in this regard. PEG is useful to stabilize proteins and as a cryoprotectant and can be used in the invention in this regard.

[0398] Embodiments of the antibody construct of the invention formulations further comprise surfactants. Protein molecules may be susceptible to adsorption on surfaces and to denaturation and consequent aggregation at air-liquid, solid-liquid, and liquid-liquid interfaces. These effects generally scale inversely with protein concentration. These deleterious interactions generally scale inversely with protein concentration and typically are exacerbated by physical agitation, such as that generated during the shipping and handling of a product. Surfactants routinely are used to prevent, minimize, or reduce surface adsorption. Useful surfactants in the invention in this regard include polysorbate 20, polysorbate 80, other fatty acid esters of sorbitan polyethoxylates, and poloxamer 188. Surfactants also are commonly used to control protein conformational stability. The use of surfactants in this regard is protein-specific since, any given surfactant typically will stabilize some proteins and destabilize others.

[0399] Polysorbates are susceptible to oxidative degradation and often, as supplied, contain sufficient quantities of peroxides to cause oxidation of protein residue side-chains, especially methionine. Consequently, polysorbates should be used carefully, and when used, should be employed at their lowest effective concentration. In this regard, polysorbates exemplify the general rule that excipients should be used in their lowest effective concentrations.

[0400] Embodiments of the antibody construct of the invention formulations further comprise one or more antioxidants. To some extent deleterious oxidation of proteins can be prevented in pharmaceutical formulations by maintaining proper levels of ambient oxygen and temperature and by avoiding exposure to light. Antioxidant excipients can be used as well to prevent oxidative degradation of proteins. Among useful antioxidants in this regard are reducing agents, oxygen/free-radical scavengers, and chelating agents. Antioxidants for use in therapeutic protein formulations in accordance with the invention preferably are water-soluble and maintain their activity throughout the shelf life of a product. EDTA is a preferred antioxidant in accordance with the invention in this regard. Antioxidants can damage proteins. For instance, reducing agents, such as glutathione in particular, can disrupt intramolecular disulfide linkages. Thus, antioxidants for use in the invention are selected to, among other things, eliminate or sufficiently reduce the possibility of themselves damaging proteins in the formulation.

[0401] Formulations in accordance with the invention may include metal ions that are protein co-factors and that are necessary to form protein coordination complexes, such as zinc necessary to form certain insulin suspensions. Metal ions also can inhibit some processes that degrade proteins. However, metal ions also catalyze physical and chemical processes that degrade proteins. Magnesium ions (10-120 mM) can be used to inhibit isomerization of aspartic acid to isoaspartic acid. Ca⁺² ions (up to 100 mM) can increase the stability of human deoxyribonuclease. Mg²⁺, Mn²⁺, and Zn²⁺, however, can destabilize rhDNase. Similarly, Ca²⁺ and Sr⁺² can stabilize Factor VIII, it can be destabilized by Mg²⁺, Mn²⁺ and Zn⁺², Cu²⁺ and Fe²⁺, and its aggregation can be increased by Al⁺³ ions.

[0402] Embodiments of the antibody construct of the invention formulations further comprise one or more preservatives. Preservatives are necessary when developing multi-dose parenteral formulations that involve more than one extraction from the same container. Their primary function is to inhibit microbial growth and ensure product sterility throughout the shelf-life or term of use of the drug product. Commonly used preservatives include benzyl alcohol, phenol and m-cresol. Although preservatives have a long history of use with small-molecule parenterals, the development of protein formulations that includes preservatives can be challenging. Preservatives almost always have a destabilizing effect (aggregation) on proteins, and this has become a major factor in limiting their use in multi-dose protein formulations. To date, most protein drugs have been formulated for single-use only. However, when multi-dose formulations are possible, they have the added advantage of enabling patient convenience, and increased marketability. A good example is that of human growth hormone (hGH) where the development of preserved formulations has led to commercialization of more convenient, multi-use injection pen presentations. At least four such pen devices containing preserved formulations of hGH are currently available on the market. Norditropin (liquid, Novo Nordisk), Nutropin AQ (liquid, Genentech) & Genotropin (lyophilized—dual chamber cartridge, Pharmacia & Upjohn) contain phenol while Somatrope (Eli Lilly) is formulated with m-cresol. Several aspects need to be considered during the formulation and development of preserved dosage forms. The effective preservative concentration in the drug product must be optimized. This requires testing a given preservative in the dosage form with concentration ranges that confer anti-microbial effectiveness without compromising protein stability.

[0403] As might be expected, development of liquid formulations containing preservatives are more challenging than lyophilized formulations. Freeze-dried products can be lyophilized without the preservative and reconstituted with a preservative containing diluent at the time of use. This shortens the time for which a preservative is in contact with the protein, significantly minimizing the associated stability risks. With liquid formulations, preservative effectiveness and stability should be maintained over the entire product shelf-life (about 18 to 24 months). An important point to note is that preservative effectiveness should be demonstrated in the final formulation containing the active drug and all excipient components.

[0404] The antibody constructs disclosed herein may also be formulated as immuno-liposomes. A “liposome” is a small vesicle composed of various types of lipids, phospholipids and/or surfactant which is useful for delivery of a drug to a mammal. The components of the liposome are commonly arranged in a bilayer formation, similar to the lipid arrangement of biological membranes. Liposomes containing the antibody construct are prepared by methods known in the art, such as described in Epstein et al., Proc. Natl. Acad. Sci. USA, 82: 3688 (1985); Hwang et al., Proc. Natl Acad. Sci. USA, 77: 4030 (1980); U.S. Pat. Nos. 4,485,045 and 4,544,545; and WO 97/38731. Liposomes with enhanced circulation time are disclosed in U.S. Pat. No. 5,013,556. Particularly useful liposomes can be generated by the reverse phase evaporation method with a lipid composition comprising phosphatidylcholine, cholesterol and PEG-derivatized phosphatidylethanolamine (PEG-PE). Liposomes are extruded through filters of defined pore size to yield liposomes with the desired diameter. Fab′ fragments of the antibody construct of the present invention can be conjugated to the liposomes as described in Martin et al. J. Biol. Chem. 257: 286-288 (1982) via a disulfide interchange reaction. A chemotherapeutic agent is optionally contained within the liposome. See Gabizon et al. J. National Cancer Inst. 81 (19) 1484 (1989).

[0405] Once the pharmaceutical composition has been formulated, it may be stored in sterile vials as a solution, suspension, gel, emulsion, solid, crystal, or as a dehydrated or lyophilized powder. Such formulations may be stored either in a ready-to-use form or in a form (e.g., lyophilized) that is reconstituted prior to administration.

[0406] The biological activity of the pharmaceutical composition defined herein can be determined for instance by cytotoxicity assays, as described in the following examples, in WO 99/54440 or by Schlereth et al. (Cancer Immunol. Immunother. 20 (2005), 1-12). “Efficacy” or “in vivo efficacy” as used herein refers to the response to therapy by the pharmaceutical composition of the invention, using e.g. standardized NCI response criteria. The success or in vivo efficacy of the therapy using a pharmaceutical composition of the invention refers to the effectiveness of the composition for its intended purpose, i.e. the ability of the composition to cause its desired effect, i.e. depletion of pathologic cells, e.g. tumor cells. The in vivo efficacy may be monitored by established standard methods for the respective disease entities including, but not limited to white blood cell counts, differentials, Fluorescence Activated Cell Sorting, bone marrow aspiration. In addition, various disease specific clinical chemistry parameters and other established standard methods may be used. Furthermore, computer-aided tomography, X-ray, nuclear magnetic resonance tomography (e.g. for National Cancer Institute-criteria based response assessment [Cheson B D, Horning S J, Coiffier B, Shipp M A, Fisher R I, Connors J M, Lister T A, Vose J, Grillo-Lopez A, Hagenbeek A, Cabanillas F, Klippensten D, Hiddemann W, Castellino R, Harris N L, Armitage J O, Carter W, Hoppe R, Canellos G P. Report of an international workshop to standardize response criteria for non-Hodgkin's lymphomas. NCI Sponsored International Working Group. J Clin Oncol. 1999 April; 17(4):1244]), positron-emission tomography scanning, white blood cell counts, differentials, Fluorescence Activated Cell Sorting, bone marrow aspiration, lymph node biopsies/histologies, and various lymphoma specific clinical chemistry parameters (e.g. lactate dehydrogenase) and other established standard methods may be used.

[0407] Another major challenge in the development of drugs such as the pharmaceutical composition of the invention is the predictable modulation of pharmacokinetic properties. To this end, a pharmacokinetic profile of the drug candidate, i.e. a profile of the pharmacokinetic parameters that affect the ability of a particular drug to treat a given condition, can be established. Pharmacokinetic parameters of the drug influencing the ability of a drug for treating a certain disease entity include, but are not limited to: half-life, volume of distribution, hepatic first-pass metabolism and the degree of blood serum binding. The efficacy of a given drug agent can be influenced by each of the parameters mentioned above.

[0408] “Half-life” means the time where 50% of an administered drug are eliminated through biological processes, e.g. metabolism, excretion, etc. By “hepatic first-pass metabolism” is meant the propensity of a drug to be metabolized upon first contact with the liver, i.e. during its first pass through the liver. “Volume of distribution” means the degree of retention of a drug throughout the various compartments of the body, like e.g. intracellular and extracellular spaces, tissues and organs, etc. and the distribution of the drug within these compartments. “Degree of blood serum binding” means the propensity of a drug to interact with and bind to blood serum proteins, such as albumin, leading to a reduction or loss of biological activity of the drug.

[0409] Pharmacokinetic parameters also include bioavailability, lag time (Tlag), Tmax, absorption rates, more onset and/or Cmax for a given amount of drug administered. “Bioavailability” means the amount of a drug in the blood compartment. “Lag time” means the time delay between the administration of the drug and its detection and measurability in blood or plasma. “Tmax” is the time after which maximal blood concentration of the drug is reached, and “Cmax” is the blood concentration maximally obtained with a given drug. The time to reach a blood or tissue concentration of the drug which is required for its biological effect is influenced by all parameters. Pharmacokinetic parameters of bispecific antibody constructs exhibiting cross-species specificity, which may be determined in preclinical animal testing in non-chimpanzee primates as outlined above, are also set forth e.g. in the publication by Schlereth et al. (Cancer Immunol. Immunother. 20 (2005), 1-12).

[0410] One embodiment provides the antibody construct of the invention or the antibody construct produced according to the process of the invention for use in the prevention, treatment or amelioration of a tumor or cancer disease or of a metastatic cancer disease.

[0411] The formulations described herein are useful as pharmaceutical compositions in the treatment, amelioration and/or prevention of the pathological medical condition as described herein in a patient in need thereof. The term “treatment” refers to both therapeutic treatment and prophylactic or preventative measures. Treatment includes the application or administration of the formulation to the body, an isolated tissue, or cell from a patient who has a disease/disorder, a symptom of a disease/disorder, or a predisposition toward a disease/disorder, with the purpose to cure, heal, alleviate, relieve, alter, remedy, ameliorate, improve, or affect the disease, the symptom of the disease, or the predisposition toward the disease.

[0412] The term “amelioration” as used herein refers to any improvement of the disease state of a patient having a tumor or cancer or a metastatic cancer as specified herein below, by the administration of an antibody construct according to the invention to a subject in need thereof. Such an improvement may also be seen as a slowing or stopping of the p progression of the tumor or cancer or metastatic cancer of the patient. The term “prevention” as used herein means the avoidance of the occurrence or re-occurrence of a patient having a tumor or cancer or a metastatic cancer as specified herein below, by the administration of an antibody construct according to the invention to a subject in need thereof.

[0413] The term “disease” refers to any condition that would benefit from treatment with the antibody construct or the pharmaceutic composition described herein. This includes chronic and acute disorders or diseases including those pathological conditions that predispose the mammal to the disease in question.

[0414] A “neoplasm” is an abnormal growth of tissue, usually but not always forming a mass. When also forming a mass, it is commonly referred to as a “tumor”. Neoplasms or tumors can be benign, potentially malignant (pre-cancerous), or malignant. Malignant neoplasms are commonly called cancer. They usually invade and destroy the surrounding tissue and may form metastases, i.e., they spread to other parts, tissues or organs of the body. Hence, the term “metastatic cancer” encompasses metastases to other tissues or organs than the one of the original tumor. Lymphomas and leukemias are lymphoid neoplasms. For the purposes of the present invention, they are also encompassed by the terms “tumor” or “cancer”.

[0415] In a preferred embodiment of the invention, the tumor or cancer disease is selected from the group including, but not limited to, (or consisting of) lung cancer, preferably SCLC, breast, cervical, colon, colorectal, endometrial, head and neck, liver, ovarian, pancreatic, prostate, skin, gastric, testis, thyroid, adrenal, renal, bladder, uterine, esophageal, urothelial and brain tumor or cancer, lymphoma, carcinoma, and sarcoma, and a metastatic cancer disease derived from any of the foregoing.

[0416] More specifically, the tumor or cancer disease can be selected from the group consisting of small cell lung cancer (SCLC), non-small ceil lung cancer (NSCLC), glioma, glioblastoma, melanoma, neuroendocrine prostate cancer, neuroendocrine pancreatic cancer, hepatoblastoma, and hepatocellular carcinoma. The metastatic cancer disease can be derived from any of the foregoing.

[0417] The invention also provides a method for the treatment or amelioration of tumor or cancer disease or a metastatic cancer disease, comprising the step of administering to a subject in need thereof the antibody construct of the invention or the antibody construct produced according to the process of the invention.

[0418] The terms “subject in need” or those “in need of treatment” includes those already with the disorder, as well as those in which the disorder is to be prevented. The subject in need or “patient” includes human and other mammalian subjects that receive either prophylactic or therapeutic treatment.

[0419] The antibody construct of the invention will generally be designed for specific routes and methods of administration, for specific dosages and frequencies of administration, for specific treatments of specific diseases, with ranges of bio-availability and persistence, among other things. The materials of the composition are preferably formulated in concentrations that are acceptable for the site of administration.

[0420] Formulations and compositions thus may be designed in accordance with the invention for delivery by any suitable route of administration. In the context of the present invention, the routes of administration include, but are not limited to

[0421] topical routes (such as epicutaneous, inhalational, nasal, opthalmic, auricular/aural, vaginal, mucosal);

[0422] enteral routes (such as oral, gastrointestinal, sublingual, sublabial, buccal, rectal); and

[0423] parenteral routes (such as intravenous, intraarterial, intraosseous, intramuscular, intracerebral, intracerebroventricular, epidural, intrathecal, subcutaneous, intraperitoneal, extra-amniotic, intraarticular, intracardiac, intradermal, intralesional, intrauterine, intravesical, intravitreal, transdermal, intranasal, transmucosal, intrasynovial, intraluminal).

[0424] The pharmaceutical compositions and the antibody construct of this invention are particularly useful for parenteral administration, e.g., subcutaneous or intravenous delivery, for example by injection such as bolus injection, or by infusion such as continuous infusion. Pharmaceutical compositions may be administered using a medical device. Examples of medical devices for administering pharmaceutical compositions are described in U.S. Pat. Nos. 4,475,196; 4,439,196; 4,447,224; 4,447, 233; 4,486,194; 4,487,603; 4,596,556; 4,790,824; 4,941,880; 5,064,413; 5,312,335; 5,312,335; 5,383,851; and 5,399,163.

[0425] In particular, the present invention provides for an uninterrupted administration of the suitable composition. As a non-limiting example, uninterrupted or substantially uninterrupted, i.e. continuous administration may be realized by a small pump system worn by the patient for metering the influx of therapeutic agent into the body of the patient. The pharmaceutical composition comprising the antibody construct of the invention can be administered by using said pump systems. Such pump systems are generally known in the art, and commonly rely on periodic exchange of cartridges containing the therapeutic agent to be infused. When exchanging the cartridge in such a pump system, a temporary interruption of the otherwise uninterrupted flow of therapeutic agent into the body of the patient may ensue. In such a case, the phase of administration prior to cartridge replacement and the phase of administration following cartridge replacement would still be considered within the meaning of the pharmaceutical means and methods of the invention together make up one “uninterrupted administration” of such therapeutic agent.

[0426] The continuous or uninterrupted administration of the antibody constructs of the invention may be intravenous or subcutaneous by way of a fluid delivery device or small pump system including a fluid driving mechanism for driving fluid out of a reservoir and an actuating mechanism for actuating the driving mechanism. Pump systems for subcutaneous administration may include a needle or a cannula for penetrating the skin of a patient and delivering the suitable composition into the patient's body. Said pump systems may be directly fixed or attached to the skin of the patient independently of a vein, artery or blood vessel, thereby allowing a direct contact between the pump system and the skin of the patient. The pump system can be attached to the skin of the patient for 24 hours up to several days. The pump system may be of small size with a reservoir for small volumes. As a non-limiting example, the volume of the reservoir for the suitable pharmaceutical composition to be administered can be between 0.1 and 50 ml.

[0427] The continuous administration may also be transdermal by way of a patch worn on the skin and replaced at intervals. One of skill in the art is aware of patch systems for drug delivery suitable for this purpose. It is of note that transdermal administration is especially amenable to uninterrupted administration, as exchange of a first exhausted patch can advantageously be accomplished simultaneously with the placement of a new, second patch, for example on the surface of the skin immediately adjacent to the first exhausted patch and immediately prior to removal of the first exhausted patch. Issues of flow interruption or power cell failure do not arise.

[0428] If the pharmaceutical composition has been lyophilized, the lyophilized material is first reconstituted in an appropriate liquid prior to administration. The lyophilized material may be reconstituted in, e.g., bacteriostatic water for injection (BWFI), physiological saline, phosphate buffered saline (PBS), or the same formulation the protein had been in prior to lyophilization.

[0429] The compositions of the present invention can be administered to the subject at a suitable dose which can be determined e.g. by dose escalating studies by administration of increasing doses of the antibody construct of the invention exhibiting cross-species specificity described herein to non-chimpanzee primates, for instance macaques. As set forth above, the antibody construct of the invention exhibiting cross-species specificity described herein can be advantageously used in identical form in preclinical testing in non-chimpanzee primates and as drug in humans. The dosage regimen will be determined by the attending physician and clinical factors. As is well known in the medical arts, dosages for any one patient depend upon many factors, including the patient's size, body surface area, age, the particular compound to be administered, sex, time and route of administration, general health, and other drugs being administered concurrently.

[0430] The term “effective dose” or “effective dosage” is defined as an amount sufficient to achieve or at least partially achieve the desired effect. The term “therapeutically effective dose” is defined as an amount sufficient to cure or at least partially arrest the disease and its complications in a patient already suffering from the disease. Amounts or doses effective for this use will depend on the condition to be treated (the indication), the delivered antibody construct, the therapeutic context and objectives, the severity of the disease, prior therapy, the patient's clinical history and response to the therapeutic agent, the route of administration, the size (body weight, body surface or organ size) and/or condition (the age and general health) of the patient, and the general state of the patient's own immune system. The proper dose can be adjusted according to the judgment of the attending physician such that it can be administered to the patient once or over a series of administrations, and in order to obtain the optimal therapeutic effect.

[0431] A typical dosage may range from about 0.1 μg/kg to up to about 30 mg/kg or more, depending on the factors mentioned above. In specific embodiments, the dosage may range from 1.0 μg/kg up to about 20 mg/kg, optionally from 10 μg/kg up to about 10 mg/kg or from 100 μg/kg up to about 5 mg/kg.

[0432] A therapeutic effective amount of an antibody construct of the invention preferably results in a decrease in severity of disease symptoms, an increase in frequency or duration of disease symptom-free periods or a prevention of impairment or disability due to the disease affliction. For treating DLL3-expressing tumors, a therapeutically effective amount of the antibody construct of the invention, e.g. an anti-DLL3/anti-CD3 antibody construct, preferably inhibits cell growth or tumor growth by at least about 20%, at least about 40%, at least about 50%, at least about 60%, at least about 70%, at least about 80%, or at least about 90% relative to untreated patients. The ability of a compound to inhibit tumor growth may be evaluated in an animal model predictive of efficacy in human tumors.

[0433] The pharmaceutical composition can be administered as a sole therapeutic or in combination with additional therapies such as anti-cancer therapies as needed, e.g. other proteinaceous and non-proteinaceous drugs. These drugs may be administered simultaneously with the composition comprising the antibody construct of the invention as defined herein or separately before or after administration of said antibody construct in timely defined intervals and doses.

[0434] The term “effective and non-toxic dose” as used herein refers to a tolerable dose of an inventive antibody construct which is high enough to cause depletion of pathologic cells, tumor elimination, tumor shrinkage or stabilization of disease without or essentially without major toxic effects. Such effective and non-toxic doses may be determined e.g. by dose escalation studies described in the art and should be below the dose inducing severe adverse side events (dose limiting toxicity, DLT).

[0435] The term “toxicity” as used herein refers to the toxic effects of a drug manifested in adverse events or severe adverse events. These side events might refer to a lack of tolerability of the drug in general and/or a lack of local tolerance after administration. Toxicity could also include teratogenic or carcinogenic effects caused by the drug.

[0436] The term “safety”, “in vivo safety” or “tolerability” as used herein defines the administration of a drug without inducing severe adverse events directly after administration (local tolerance) and during a longer period of application of the drug. “Safety”, “in vivo safety” or “tolerability” can be evaluated e.g. at regular intervals during the treatment and follow-up period. Measurements include clinical evaluation, e.g. organ manifestations, and screening of laboratory abnormalities. Clinical evaluation may be carried out and deviations to normal findings recorded/coded according to NCI-CTC and/or MedDRA standards. Organ manifestations may include criteria such as allergy/immunology, blood/bone marrow, cardiac arrhythmia, coagulation and the like, as set forth e.g. in the Common Terminology Criteria for adverse events v3.0 (CTCAE). Laboratory parameters which may be tested include for instance hematology, clinical chemistry, coagulation profile and urine analysis and examination of other body fluids such as serum, plasma, lymphoid or spinal fluid, liquor and the like. Safety can thus be assessed e.g. by physical examination, imaging techniques (i.e. ultrasound, x-ray, CT scans, Magnetic Resonance Imaging (MRI), other measures with technical devices (i.e. electrocardiogram), vital signs, by measuring laboratory parameters and recording adverse events. For example, adverse events in non-chimpanzee primates in the uses and methods according to the invention may be examined by histopathological and/or histochemical methods.

[0437] The above terms are also referred to e.g. in the Preclinical safety evaluation of biotechnology-derived pharmaceuticals S6; ICH Harmonised Tripartite Guideline; ICH Steering Committee meeting on Jul. 16, 1997.

[0438] In a further embodiment, the invention provides a kit comprising an antibody construct of the invention, an antibody construct produced according to the process of the invention, a polypeptide of the invention, a vector of the invention, and/or a host cell of the invention.

[0439] In the context of the present invention, the term “kit” means two or more components—one of which corresponding to the antibody construct, the pharmaceutical composition, the vector or the host cell of the invention—packaged together in a container, recipient or otherwise. A kit can hence be described as a set of products and/or utensils that are sufficient to achieve a certain goal, which can be marketed as a single unit.

[0440] The kit may comprise one or more recipients (such as vials, ampoules, containers, syringes, bottles, bags) of any appropriate shape, size and material (preferably waterproof, e.g. plastic or glass) containing the antibody construct or the pharmaceutical composition of the present invention in an appropriate dosage for administration (see above). The kit may additionally contain directions for use (e.g. in the form of a leaflet or instruction manual), means for administering the antibody construct of the present invention such as a syringe, pump, infuser or the like, means for reconstituting the antibody construct of the invention and/or means for diluting the antibody construct of the invention.

[0441] The invention also provides kits for a single-dose administration unit. The kit of the invention may also contain a first recipient comprising a dried/lyophilized antibody construct and a second recipient comprising an aqueous formulation. In certain embodiments of this invention, kits containing single-chambered and multi-chambered pre-filled syringes (e.g., liquid syringes and lyosyringes) are provided.

[0442] The Figures show:

[0443] FIG. 1

Schematic representation of the DLL3 ECD/truncated DLL3 constructs expressed on CHO cells for epitope mapping. The transmembrane and the intracellular domain are derived from EpCAM. See Example 1.

[0444] FIGS. 2A and 2B

Epitope mapping of the anti-DLL3 antibody constructs. Examples of bispecific antibody constructs recognizing the EGF-3 domain and the EGF-4 domain, respectively, as detected by epitope mapping. The x-axis depicts PE-A (PE=phycoerythrin, A=signal area), and the y-axis depicts counts. See Example 2.

[0445] FIGS. 3A-3C

Cross-Reactivity of anti-DLL3 antibody constructs as detected by flow cytometry: binding to human and macaque DLL3 and CD3. The x-axis depicts FL2-H, and the y-axis depicts counts. See Example 5.

[0446] FIG. 4

Analysis of anti-DLL3 antibody constructs by flow cytometry: non-binding to human paralogues DLL1 and DLL4. The x-axis depicts FL1-H, and the y-axis depicts counts. See Example 6.

[0447] FIG. 5

Stability of anti-DLL3 antibody constructs after incubation for 96 hours in human plasma. See Example 11.

[0448] FIG. 6

Potency gap between the monomeric and the dimeric isoform of the anti-DLL3 antibody constructs. See Example 15.

[0449] FIG. 7

In vitro internalization assay, carried out as described in Example 16. Antibody construct was pre-incubated on target cells (SHP-77) in the absence of T cells in order to measure loss of antibody construct due to internalization. Results suggest that no significant internalization occurs. The results achieved with a control target which is well known for its internalization are shown for comparison at the right.

[0450] FIGS. 8A and 8B

Results of the mouse xenograft efficacy study of the SHP-77 model (FIG. 8A) and the WM266-4 model (FIG. 8B). The tumor volume is plotted against the time. See Example 18.

[0451] FIGS. 9A and 9B

[0452] Pharmacokinetics of different HLE antibody constructs (albumin fusion in FIG. 9A and Fc fusions in FIG. 9B) as determined in Example 20.

### EXAMPLES

[0453] The following examples illustrate the invention. These examples should not be construed as to limit the scope of this invention. The present invention is limited only by the claims.

### Example 1

### Generation of CHO Cells Expressing Wild Type and Truncated DLL3

[0454] The extracellular domain of the DLL3 antigen can be subdivided into different sub-domains or regions that are defined, for the purposes of Examples 1 and 2, by the following amino acid positions:

Signal peptide: 1-26

### N-terminus: 27-175

### DSL: 176-215

### EGF-1: 216-249

### EGF-2: 274-310

### EGF-3: 312-351

### EGF-4: 353-389

### EGF-5: 391-427

### EGF-6: 429-465

[0455] For the construction of the truncated DLL3 molecules used for epitope mapping, the sequences of the respective eight extracellular domains (Signal peptide plus N-terminus, DSL, EGF1, EGF2, EGF3, EGF4, EGF5 and EGF6) of human DLL3 were stepwise deleted from the antigen, starting from the N-terminus. The following molecules were generated; see also FIG. 1:

| | |
|---|---|
| Hu DLL3 ECD/complete ECD | SEQ ID NO: 263 |
| Hu DLL3 ECD/up to DSL | SEQ ID NO: 264 |
| Hu DLL3 ECD/up to EGF-1 | SEQ ID NO: 265 |
| Hu DLL3 ECD/up to EGF-2 | SEQ ID NO: 266 |
| Hu DLL3 ECD/up to EGF-3 | SEQ ID NO: 267 |
| Hu DLL3 ECD/up to EGF-4 | SEQ ID NO: 268 |
| Hu DLL3 ECD/up to EGF-5 | SEQ ID NO: 269 |
| Hu DLL3 ECD/only EGF-6 | SEQ ID NO: 270 |

[0456] For the generation of CHO cells expressing human, cynomolgus macaque (“cyno”) and truncated human N-terminal V5 tagged DLL3, the respective coding sequences for human DLL3-ECD (SEQ ID NO: 253; see also GeneBank accession number NM_016941), cyno DLL3-ECD (SEQ ID NO: 272) and the seven truncated human N-terminal V5 tagged DLL3-ECD versions (see above) were cloned into a plasmid designated pEF-DHFR (pEF-DHFR is described in Raum et al. Cancer Immunol Immunother 50 (2001) 141-150). For cell surface expression of human and cyno DLL3 the original signal peptide was used, and for cell surface expression of the truncated human N-terminal DLL3 a mouse IgG heavy chain signal peptide was used, followed by a V5 tag. All mentioned DLL3-ECD sequences were followed in frame by the coding sequence of an artificial Ser/Gly-linker followed by a domain derived from the transmembrane/intracellular domain of human EpCAM (amino acids 266-314 of the sequence as published in Gen Bank accession number NM_002354). All cloning procedures were carried out according to standard protocols (Sambrook, Molecular Cloning; A Laboratory Manual, 3rd edition, Cold Spring Harbour Laboratory Press, Cold Spring Harbour, N.Y. (2001)). For each construct, a corresponding plasmid was transfected into DHFR deficient CHO cells for eukaryotic expression, as described by Kaufman R. J. (1990) Methods Enzymol. 185, 537-566.

[0457] The expression of human and cyno DLL3 on CHO cells was verified in a FACS assay using a monoclonal mouse IgG2b anti-human DLL3 antibody. The expression of the seven truncated versions of human DLL3-ECD was verified using a monoclonal mouse IgG2a anti-v5 tag antibody. Bound monoclonal antibody was detected with an anti-mouse IgG Fc-gamma-PE. As negative control, cells were incubated with isotype control antibody instead of the first antibody. The samples were measured by flow cytometry.

### Example 2

### Epitope Mapping of Anti-DLL3 Antibody Constructs

[0458] Cells transfected with human DLL3 and with the truncated human DLL3 molecules (see Example 1) were stained with crude, undiluted periplasmic extract containing bispecific DLL3×CD3 antibody constructs (with the CD3 binding domain being denominated 12C) fused to a human albumin (variant 1), in PBS/1.5% FCS. Bound molecules were detected with an in-house mouse monoclonal anti-CD3 binding domain antibody (50 μl) followed by an anti-mouse IgG Fc-gamma-PE (1:100, 50 μl; Jackson Immunoresearch #115-116-071) All antibodies were diluted in PBS/1.5% FCS. As negative control, cells were incubated with PBS/2% FCS instead of the periplasmic extract. The samples were measured by flow cytometry.

[0459] The regions that were recognized by the respective DLL3 binding domains are indicated in the sequence table (Table 18). Binders were mapped that were specific for an epitope located within the N-terminus of DLL3, within the DSL domain, and within the different EGF domains.

[0460] FIGS. 2A and 2B shows two exemplary binders which bind to a DLL3 epitope comprised within the EGF-3 region (loss of the FACS signal in the respective truncated DLL3 constructs not comprising EGF-3). FIGS. 2A and 2B also shows an exemplary binder which binds to a DLL3 epitope comprised within the EGF-3 region (loss of the FACS signal in the respective truncated DLL3 constructs not comprising EGF-4).

[0461] Some of the binders are described to be specific for an epitope located with the region denominated EGF-5/[6]. The squared brackets are meant to indicate that the FACS signal of the binder is decreased (i.e., neither fully present nor fully lost) for the truncated DLL3 construct having only the EGF-6 domain left (last construct in FIG. 1).

[0462] The bispecific DLL3×CD3 constructs used in the following examples are chosen from those constructs having “I2C” as the CD3 binding domain and having a C-terminal fusion to a wild-type human serum albumin, see e.g. SEQ ID NOs: 224-230, 233-235, 238-241.

### Example 3

### Biacore-Based Determination of Antibody Affinity to Human and Cynomolgus DLL3

[0463] Biacore analysis experiments were performed using recombinant human/cyno DLL3-ECD fusion proteins with chicken albumin to determine target binding of the antibody constructs of the invention.

[0464] In detail, CM5 Sensor Chips (GE Healthcare) were immobilized with approximately 600-800 RU of the respective recombinant antigen using acetate buffer pH 4.5 according to the manufacturer's manual. The DLL3×CD3 bispecific antibody construct samples were loaded in a dilution series of the following concentrations: 50 nM, 25 nM, 12.5 nM, 6.25 nM and 3.13 nM diluted in HBS-EP running buffer (GE Healthcare). Flow rate was 30 μl/min for 3 min, then HBS-EP running buffer was applied for 8 min to 20 min again at a flow rate of 30 μl/ml. Regeneration of the chip was performed using 10 mM glycine 10 mM NaCl pH 1.5 solution. Data sets were analyzed using BiaEval Software. In general two independent experiments were performed.

[0465] The DLL3×CD3 bispecific antibody constructs according to the invention showed very high affinities to human DLL3 in the subnanomolar range (with the exception of DLL3-13 having a KD value in the very low one-digit nanomolar range). Binding to macaque DLL3 was balanced, also showing affinities in similar ranges. The affinity values as well as the calculated affinity gap are shown in Table 2.

TABLE 2
Affinities of DLL3xCD3 bispecific antibody constructs to
human and macaque DLL3 as determined by Biacore analysis,
as well as the calculated interspecies affinity gaps.

| DLL3xCD3 | KD hu | KD cyno | Affinity |
|---|---|---|---|
| bispecific | DLL3 | DLL3 | gap KD |
| antibody construct | [nM] | [nM] | mac/KD hu |
| DLL3-4 | 0.41 | 0.55 | 1.34 |
| DLL3-5 | 0.82 | 1.03 | 1.26 |
| DLL3-6 | 0.55 | 0.75 | 1.36 |
| DLL3-7 | 0.19 | 0.29 | 1.52 |
| DLL3-8 | 0.69 | 0.96 | 1.39 |
| DLL3-9 | 0.35 | 0.54 | 1.54 |
| DLL3-10 | 0.24 | 0.33 | 1.38 |
| DLL3-13 | 1.74 | 5.55 | 3.19 |
| DLL3-14 | 0.47 | 0.86 | 1.83 |
| DLL3-15 | 0.45 | 0.69 | 1.53 |

[0466] Furthermore, the binding of the bispecific antibody constructs to both human CD3 and macaque CD3 was confirmed in a Biacore assay to be in a low 2-digit nanomolar range (data not shown).

### Example 4

### Scatchard-Based Analysis of DLL3×CD3 Bispecific Antibody Construct Affinity to Human and Macaque DLL3 on Target Antigen Positive Cells and Determination of the Interspecies Affinity Gap

[0467] The affinities of DLL3×CD3 bispecific antibody constructs to CHO cells transfected with human or macaque DLL3 were also determined by Scatchard analysis as the most reliable method for measuring potential affinity gaps between human and macaque DLL3. For the Scatchard analysis, saturation binding experiments are performed using a monovalent detection system to precisely determine monovalent binding of the DLL3×CD3 bispecific antibody constructs to the respective cell line.

[0468] 2×10⁴ cells of the respective cell line (recombinantly human DLL3-expressing CHO cell line, recombinantly macaque DLL3-expressing CHO cell line) were incubated each with 50 μl of a triplet dilution series (twelve dilutions at 1:2) of the respective DLL3×CD3 bispecific antibody construct (until saturation is reached) starting at 10-20 nM followed by 16 h incubation at 4° C. under agitation and one residual washing step. Then, the cells were incubated for another hour with 30 μl of a CD3×ALEXA488 conjugate solution. After one washing step, the cells were resuspended in 150 μl FACS buffer containing 3.5% formaldehyde, incubated for further 15 min, centrifuged, resuspended in FACS buffer and analyzed using a FACS Cantoll machine and FACS Diva software. Data were generated from two independent sets of experiments, each using triplicates. Respective Scatchard analysis was calculated to extrapolate maximal binding (Bmax). The concentrations of DLL3×CD3 bispecific antibody constructs at half-maximal binding were determined reflecting the respective KDs. Values of triplicate measurements were plotted as hyperbolic curves and as S-shaped curves to demonstrate proper concentration ranges from minimal to optimal binding.

[0469] Values depicted in Table 3 were derived from two independent experiments per DLL3×CD3 bispecific antibody construct. Cell based Scatchard analysis confirmed that the DLL3×CD3 bispecific antibody constructs of the invention are subnanomolar in affinity to human DLL3 and to mac DLL3 and present with a small cyno/human interspecies affinity gap of around

TABLE 3
Affinities (KD) of DLL3xCD3 bispecific antibody constructs
as determined in cell based Scatchard analysis with
the calculated affinity gap KD macaque DLL3/KD human
DLL3. Antibody constructs were measured in two independent
experiments, each using triplicates.

| DLL3xCD3 | Cell based | Cell based | Affinity |
|---|---|---|---|
| bispecific | affinity hu | affinity mac | gap KD |
| antibody construct | DLL3 [nM] | DLL3 [nM] | mac/KD hu |
| DLL3-4 | 0.39 | 0.24 | 0.6 |
| DLL3-5 | 0.33 | 0.22 | 0.7 |
| DLL3-6 | 0.33 | 0.23 | 0.7 |
| DLL3-7 | 0.21 | 0.33 | 1.6 |
| DLL3-8 | 0.18 | 0.34 | 1.9 |
| DLL3-9 | 0.30 | 0.49 | 1.6 |
| DLL3-10 | 0.37 | 0.32 | 0.8 |
| DLL3-13 | 0.24 | 0.29 | 1.2 |
| DLL3-14 | 0.53 | 0.51 | 1.0 |
| DLL3-15 | 0.25 | 0.50 | 2.0 |

### Example 5

### Bispecific Binding and Interspecies Cross-Reactivity

[0470] For confirmation of binding to human DLL3 and CD3 and to cyno DLL3 and CD3, bispecific antibody constructs of the invention were tested by flow cytometry using
[0471] CHO cells transfected with human DLL3, with an artificial human DLL3 isoform (characterized by the point mutations F172C and L218P), and with macaque DLL3, respectively,
[0472] the human DLL3 positive human lung carcinoma cell line SHP-77,
[0473] CD3-expressing human T cell leukemia cell line HPB-all (DSMZ, Braunschweig, ACC483), and
[0474] the cynomolgus CD3-expressing T cell line LnPx 4119

[0475] For flow cytometry 200,000 cells of the respective cell lines were incubated for 60 min at 4° C. with 50 μl of purified bispecific antibody construct at a concentration of 5 μg/ml. The cells were washed twice in PBS/2% FCS and then incubated with an in-house mouse antibody (2 μg/ml) specific for the CD3 binding part of the bispecific antibody constructs for 30 min at 4° C. After washing, bound mouse antibodies were detected with a goat anti-mouse Fcγ-PE (1:100) for 30 min at 4° C. Samples were measured by flow cytometry. Non-transfected CHO cells were used as negative control.

[0476] The results are shown in FIGS. 3A-3C. The DLL3×CD3 bispecific antibody constructs of the invention stained CHO cells transfected with human DLL3, the artificial DLL3 isoform and with cyno DLL3, and they also stained the human DLL3 positive human lung carcinoma cell line SHP-77 (natural expresser). Human and cyno T cell lines expressing CD3 were also recognized by the bispecific antibody constructs. Moreover, there was no staining of the negative control cells (non-transfected CHO, data shown in Example 6).

### Example 6

### Confirmation of the Absence of Binding to Human Paralogues

[0477] Human DLL3 paralogues DLL1 and DLL4 were stably transfected into CHO cells. The sequences of the paralogues as used in the present Example are identified in the sequence listing (SEQ ID NOs: 283 and 284). Protein expression was confirmed in FACS analyses with antibodies specific for the respective paralogues: Antibodies were anti-human DLL1 MAB1818 (R&D; 5 μg/ml), and anti-human DLL4 MAB1506 (R&D; 5 μg/ml) for DLL4.

[0478] The flow cytometry assay was carried out as described in Example 5, with the exception that bound mouse antibodies were detected with a goat anti-mouse FITC (1:100). The results are shown in FIG. 4. The analysis confirmed that none of the DLL3×CD3 bispecific antibody constructs of the invention cross-reacts with the human DLL3 paralogues DLL1 and DLL4.

### Example 7

### Identity to Human Germline

[0479] In order to analyze the identity/similarity of the sequence of the antibody constructs to the human antibody germline genes, the DLL3 binding domains of the invention were aligned as follows: Full VL including all CDRs was aligned; full VH including CDRs 1 and 2 but except CDR3 was aligned against human antibody germline genes (Vbase). More details can be found in the specification of this application. The results are shown in Table 4 below:

TABLE 4
Identity of VH and VL to human germline

| DLL3xCD3 | % identity to |
|---|---|
| bispecific | human germline |
| antibody construct | [VH/VL] |
| DLL3-4 | 96.9/93.3 |
| DLL3-5 | 96.9/96.6 |
| DLL3-6 | 96.9/96.6 |
| DLL3-7 | 93.9/96.6 |
| DLL3-8 | 94.8/96.6 |
| DLL3-9 | 96.9/95.5 |
| DLL3-10 | 91.9/95.5 |
| DLL3-13 | 95.9/95.7 |
| DLL3-14 | 94.9/94.6 |
| DLL3-15 | 93.9/94.6 |

### Example 8

### Cytotoxic Activity

[0480] The potency of DLL3×CD3 bispecific antibody constructs of the invention in redirecting effector T cells against DLL3-expressing target cells was analyzed in five in vitro cytotoxicity assays:
[0481] The potency of DLL3×CD3 bispecific antibody constructs in redirecting stimulated human CD8+ effector T cells against human DLL3-transfected CHO cells was measured in an 18 hour 51-chromium release assay.
[0482] The potency of DLL3×CD3 bispecific antibody constructs in redirecting stimulated human CD8+ effector T cells against the DLL3 positive human lung carcinoma cell line SHP-77 was measured in an 18 hour 51-chromium release assay.
[0483] The potency of DLL3×CD3 bispecific antibody constructs in redirecting the T cells in unstimulated human PBMC against human DLL3-transfected CHO cells was measured in a 48 hour FACS-based cytotoxicity assay.
[0484] The potency of DLL3×CD3 bispecific antibody constructs in redirecting the T cells in unstimulated human PBMC against the DLL3-positive human cell line SHP-77 was measured in a 48 hour FACS-based cytotoxicity assay.
[0485] For confirmation that the cross-reactive DLL3×CD3 bispecific antibody constructs are capable of redirecting macaque T cells against macaque DLL3-transfected CHO cells, a 48 hour FACS-based cytotoxicity assay was performed with a macaque T cell line as effector T cells.

### Example 8.1

[0486] Chromium Release Assay with Stimulated Human T Cells

[0487] Stimulated T cells enriched for CD8+ T cells were obtained as described in the following. A petri dish (145 mm diameter, Greiner bio-one GmbH, Kremsmünster) was coated with a commercially available anti-CD3 specific antibody (OKT3, Orthoclone) in a final concentration of 1 μg/ml for 1 hour at 37° C. Unbound protein was removed by one washing step with PBS. 3-5×10⁷ human PBMC were added to the precoated petri dish in 120 ml of RPMI 1640 with stabilized glutamine/10% FCS/IL-2 20 U/ml (Proleukin®, Chiron) and stimulated for 2 days. On the third day, the cells were collected and washed once with RPMI 1640. IL-2 was added to a final concentration of 20 U/ml and the cells were cultured again for one day in the same cell culture medium as above. CD8⁺ cytotoxic T lymphocytes (CTLs) were enriched by depletion of CD4⁺ T cells and CD56+NK cells using Dynal-Beads according to the manufacturer's protocol.

[0488] Cyno DLL3- or human DLL3-transfected CHO target cells were washed twice with PBS and labeled with 11.1 MBq ⁵¹Cr in a final volume of 100 μl RPMI with 50% FCS for 60 minutes at 37° C. Subsequently, the labeled target cells were washed 3 times with 5 ml RPMI and then used in the cytotoxicity assay. The assay was performed in a 96-well plate in a total volume of 200 μl supplemented RPMI with an E:T ratio of 10:1. A starting concentration of 0.01-1 μg/ml of purified bispecific antibody construct and threefold dilutions thereof were used. Incubation time for the assay was 18 hours. Cytotoxicity was determined as relative values of released chromium in the supernatant relative to the difference of maximum lysis (addition of Triton-X) and spontaneous lysis (without effector cells). All measurements were carried out in quadruplicates. Measurement of chromium activity in the supernatants was performed in a Wizard 3″ gamma counter (Perkin Elmer Life Sciences GmbH, Köln, Germany). Analysis of the results was carried out with Prism 5 for Windows (version 5.0, GraphPad Software Inc., San Diego, Calif., USA). EC50 values calculated by the analysis program from the sigmoidal dose response curves were used for comparison of cytotoxic activity.

### Example 8.2

### Potency of Redirecting Stimulated Human Effector T Cells Against Human DLL3-Transfected CHO Cells

[0489] The cytotoxic activity of DLL3×CD3 bispecific antibody constructs according to the invention was analyzed in a 51-chromium (⁵¹Cr) release cytotoxicity assay using CHO cells transfected with human DLL3 as target cells, and stimulated human CD8+ T cells as effector cells. The experiment was carried out as described in Example 8.1.

[0490] The results are shown in Table 5. The DLL3×CD3 bispecific antibody constructs showed very potent cytotoxic activity against human DLL3 transfected CHO cells in the 1-digit picomolar range.

TABLE 5
EC50 values [pM] of DLL3xCD3 bispecific antibody constructs
analyzed in a 51-chromium (⁵¹Cr) release cytotoxicity assay
using CHO cells transfected with human DLL3 as target cells,
and stimulated human CD8 T cells as effector cells.

| DLL3xCD3 | |
|---|---|
| bispecific | EC50 |
| antibody construct | [pM] |
| DLL3-4 | 3.8 |
| DLL3-5 | 4.2 |
| DLL3-6 | 2.1 |
| DLL3-7 | 2.2 |
| DLL3-8 | 1.2 |
| DLL3-9 | 1.2 |
| DLL3-10 | 1.4 |
| DLL3-13 | 1.8 |
| DLL3-14 | 5.4 |
| DLL3-15 | 9.8 |

### Example 8.3

### Potency of Redirecting Stimulated Human Effector T Cells Against the DLL3 Positive Human Lung Carcinoma Cell Line SHP-77

[0491] The cytotoxic activity of DLL3×CD3 bispecific antibody constructs was analyzed in a 51-chromium (⁵¹Cr) release cytotoxicity assay using the DLL3-positive human lung carcinoma cell line SHP-77 as source of target cells, and stimulated human CD8+ T cells as effector cells. The assay was carried out as described in Example 8.1.

[0492] In accordance with the results of the 51-chromium release assays with stimulated enriched human CD8+T lymphocytes as effector cells and human DLL3-transfected CHO cells as target cells, DLL3×CD3 bispecific antibody constructs of the present invention are also potent in cytotoxic activity against natural expresser target cells (see Table 6).

TABLE 6
EC50 values [pM] of DLL3xCD3 bispecific antibody
constructs analyzed in an 18-hour 51-chromium (⁵¹Cr) release
cytotoxicity assay with the DLL3-positive human lung carcinoma
cell line SHP-77 as source of target cells, and stimulated enriched
human CD8 T cells as effector cells.
Rows 1-10: Antibody constructs according to the invention, which
bind to a DLL3 epitope comprised within the region as depicted in SEQ
ID NO: 260. (Rows 1-7: Antibody constructs binding to a DLL3 epitope
comprised within the EGF-3 region. Rows 8-10: Antibody constructs
binding to a DLL3 epitope comprised within the EGF-4 region.)
Rows 11-14: Antibody constructs binding to a DLL3 epitope which is
comprised within the EGF-5/[EGF-6] region.

| | DLL3xCD3 bispecific | EC50 |
|---|---|---|
| Row | antibody construct | [pM] |
| 1 | DLL3-4 | 27 |
| 2 | DLL3-5 | 26 |
| 3 | DLL3-6 | 18 |
| 4 | DLL3-7 | 23 |
| 5 | DLL3-8 | 39 |
| 6 | DLL3-9 | 18 |
| 7 | DLL3-10 | 31 |
| 8 | DLL3-13 | 22 |
| 9 | DLL3-14 | 31 |
| 10 | DLL3-15 | 36 |
| 11 | DLL3-18 | 38 |
| 12 | DLL3-19 | 142 |
| 13 | DLL3-20 | 171 |
| 14 | DLL3-21 | 324 |

### Example 8.4

[0493] FACS-Based Cytotoxicity Assay with Unstimulated Human PBMC

[0494] Isolation of Effector Cells

[0495] Human peripheral blood mononuclear cells (PBMC) were prepared by Ficoll density gradient centrifugation from enriched lymphocyte preparations (buffy coats), a side product of blood banks collecting blood for transfusions. Buffy coats were supplied by a local blood bank and PBMC were prepared on the same day of blood collection. After Ficoll density centrifugation and extensive washes with Dulbecco's PBS (Gibco), remaining erythrocytes were removed from PBMC via incubation with erythrocyte lysis buffer (155 mM NH₄Cl, 10 mM KHCO₃, 100 μM EDTA). Platelets were removed via the supernatant upon centrifugation of PBMC at 100×g. Remaining lymphocytes mainly encompass B and T lymphocytes, NK cells and monocytes. PBMC were kept in culture at 37° C./5% CO₂ in RPMI medium (Gibco) with 10% FCS (Gibco).

[0496] Depletion of CD14⁺ and CD56⁺ Cells

For depletion of CD14⁺ cells, human CD14 MicroBeads (Milteny Biotec, MACS, #130-050-201) were used, for depletion of NK cells human CD56 MicroBeads (MACS, #130-050-401). PBMC were counted and centrifuged for 10 min at room temperature with 300×g. The supernatant was discarded and the cell pellet resuspended in MACS isolation buffer [80 μL/10⁷ cells; PBS (Invitrogen, #20012-043), 0.5% (v/v) FBS (Gibco, #10270-106), 2 mM EDTA (Sigma-Aldrich, #E-6511)]. CD14 MicroBeads and CD56 MicroBeads (20 μL/10⁷ cells) were added and incubated for 15 min at 4-8° C. The cells were washed with MACS isolation buffer (1-2 mL/10⁷ cells). After centrifugation (see above), supernatant was discarded and cells resuspended in MACS isolation buffer (500 μL/10⁸ cells). CD14/CD56 negative cells were then isolated using LS Columns (Miltenyi Biotec, #130-042-401). PBMC w/o CD14+/CD56+ cells were cultured in RPMI complete medium i.e. RPMI1640 (Biochrom AG, #FG1215) supplemented with 10% FBS (Biochrom AG, #S0115), lx non-essential amino acids (Biochrom AG, #K0293), 10 mM Hepes buffer (Biochrom AG, #L1613), 1 mM sodium pyruvate (Biochrom AG, #L0473) and 100 U/mL penicillin/streptomycin (Biochrom AG, #A2213) at 37° C. in an incubator until needed.

[0497] Target Cell Labeling

[0498] For the analysis of cell lysis in flow cytometry assays, the fluorescent membrane dye DiOC₁₈ (DiO) (Molecular Probes, #V22886) was used to label human DLL3- or macaque DLL3-transfected CHO cells as target cells and distinguish them from effector cells. Briefly, cells were harvested, washed once with PBS and adjusted to 10⁶ cell/mL in PBS containing 2% (v/v) FBS and the membrane dye DiO (5 μL/10⁶ cells). After incubation for 3 min at 37° C., cells were washed twice in complete RPMI medium and the cell number adjusted to 1.25×10⁵ cells/mL. The vitality of cells was determined using 0.5% (v/v) isotonic EosinG solution (Roth, #45380).

[0499] Flow Cytometry Based Analysis

[0500] This assay was designed to quantify the lysis of cyno or human DLL3-transfected CHO cells in the presence of serial dilutions of DLL3 bispecific antibody constructs. Equal volumes of DiO-labeled target cells and effector cells (i.e., PBMC w/o CD14⁺ cells) were mixed, resulting in an E:T cell ratio of 10:1. 160 μl of this suspension were transferred to each well of a 96-well plate. 40 μL of serial dilutions of the DLL3×CD3 bispecific antibody constructs and a negative control bispecific (a CD3-based bispecific antibody construct recognizing an irrelevant target antigen) or RPMI complete medium as an additional negative control were added. The bispecific antibody-mediated cytotoxic reaction proceeded for 48 hours in a 7% CO₂ humidified incubator. Then cells were transferred to a new 96-well plate and loss of target cell membrane integrity was monitored by adding propidium iodide (PI) at a final concentration of 1 μg/mL. PI is a membrane impermeable dye that normally is excluded from viable cells, whereas dead cells take it up and become identifiable by fluorescent emission.

[0501] Samples were measured by flow cytometry on a FACSCanto II instrument and analyzed by FACSDiva software (both from Becton Dickinson). Target cells were identified as DiO-positive cells. PI-negative target cells were classified as living target cells. Percentage of cytotoxicity was calculated according to the following formula:

$$Cytotoxicity [ \% ] = \frac{{n}_{dead target cells}}{{n}_{target cells}} \times 100$$

$$n = number of events$$

[0502] Using GraphPad Prism 5 software (Graph Pad Software, San Diego), the percentage of cytotoxicity was plotted against the corresponding bispecific antibody construct concentrations. Dose response curves were analyzed with the four parametric logistic regression models for evaluation of sigmoid dose response curves with fixed hill slope and EC50 values were calculated.

### Example 8.5

### Potency of Redirecting Unstimulated Human PBMC Against Human DLL3-Transfected CHO Cells

[0503] The cytotoxic activity of DLL3×CD3 bispecific antibody constructs was analyzed in a FACS-based cytotoxicity assay using CHO cells transfected with human DLL3 as target cells, and unstimulated human PBMC as effector cells. The assay was carried out as described in Example 8.4 above.

[0504] The results of the FACS-based cytotoxicity assays with unstimulated human PBMC as effector cells and human DLL3-transfected CHO cells as targets are shown in Table 7.

TABLE 7
EC50 values [pM] of DLL3xCD3 bispecific antibody
constructs as measured in a 48-hour FACS-based cytotoxicity assay
with unstimulated human PBMC as effector cells and CHO cells
transfected with human DLL3 as target cells.
Rows 1-10: Antibody constructs according to the invention, which
bind to a DLL3 epitope comprised within the region as depicted in
SEQ ID NO: 260. (Rows 1-7: Antibody constructs binding to a DLL3
epitope comprised within the EGF-3 region. Rows 8-10: Antibody
constructs binding to a DLL3 epitope comprised within the EGF-4
region.) Rows 11-14: Antibody constructs binding to a DLL3
epitope which is comprised within the EGF-5/[EGF-6] region.

| | DLL3xCD3 bispecific | EC50 |
|---|---|---|
| Row | antibody construct | [pM] |
| 1 | DLL3-4 | 53 |
| 2 | DLL3-5 | 36 |
| 3 | DLL3-6 | 44 |
| 4 | DLL3-7 | 40 |
| 5 | DLL3-8 | 43 |
| 6 | DLL3-9 | 43 |
| 7 | DLL3-10 | 40 |
| 8 | DLL3-13 | 116 |
| 9 | DLL3-14 | 66 |
| 10 | DLL3-15 | 57 |
| 11 | DLL3-18 | 169 |
| 12 | DLL3-19 | 107 |
| 13 | DLL3-20 | 171 |
| 14 | DLL3-21 | 85 |

[0505] Expectedly, EC50 values were generally higher in cytotoxicity assays with unstimulated PBMC as effector cells compared with cytotoxicity assays using stimulated human CD8+ T cells (see Example 8.2).

### Example 8.6

### Potency of Redirecting Unstimulated Human PBMC Against the DLL3-Positive Lung Carcinoma Cell Line SHP-77

[0506] The cytotoxic activity of DLL3×CD3 bispecific antibody constructs was furthermore analyzed in a FACS-based cytotoxicity assay using the DLL3-positive human lung carcinoma cell line SHP-77 as a source of target cells and unstimulated human PBMC as effector cells. The assay was carried out as described in Example 8.4 above. The results are shown in Table 8.

TABLE 8
EC50 values [pM] of DLL3xCD3 bispecific antibody
constructs as measured in a 48-hour FACS-based cytotoxicity
assay with unstimulated human PBMC as effector cells and
the human cell line SHP-77 as source of target cells.
Rows 1-10: Antibody constructs according to the invention, which
bind to a DLL3 epitope comprised within the region as depicted in SEQ
ID NO: 260. (Rows 1-7: Antibody constructs binding to a DLL3 epitope
comprised within the EGF-3 region. Rows 8-10: Antibody constructs
binding to a DLL3 epitope comprised within the EGF-4 region.)
Rows 11-14: Antibody constructs binding to a DLL3 epitope which is
comprised within the EGF-5/[EGF-6] region.

| | DLL3xCD3 bispecific | EC50 |
|---|---|---|
| Row | antibody construct | [pM] |
| 1 | DLL3-4 | 44 |
| 2 | DLL3-5 | 65 |
| 3 | DLL3-6 | 31 |
| 4 | DLL3-7 | 30 |
| 5 | DLL3-8 | 24 |
| 6 | DLL3-9 | 33 |
| 7 | DLL3-10 | 32 |
| 8 | DLL3-13 | 49 |
| 9 | DLL3-14 | 65 |
| 10 | DLL3-15 | 66 |
| 11 | DLL3-18 | 76 |
| 12 | DLL3-19 | 180 |
| 13 | DLL3-20 | 1540 |
| 14 | DLL3-21 | 770 |

### Example 8.7

### Potency of Redirecting Macaque T Cells Against Macaque DLL3-Expressing CHO Cells

[0507] Finally, the cytotoxic activity of DLL3×CD3 bispecific antibody constructs was analyzed in a FACS-based cytotoxicity assay using CHO cells transfected with macaque (cyno) DLL3 as target cells, and the macaque T cell line 4119LnPx (Knappe et al. Blood 95:3256-61 (2000)) as source of effector cells. Target cell labeling of macaque DLL3-transfected CHO cells and flow cytometry based analysis of cytotoxic activity was performed as described above.

[0508] Results are shown in Table 9. Macaque T cells from cell line 4119LnPx were induced to efficiently kill macaque DLL3-transfected CHO cells by DLL3×CD3 bispecific antibody constructs according to the invention. The antibody constructs presented potently with 2-digit picomolar EC50-values in this assay, confirming that they are very active in the macaque system.

TABLE 9
EC50 values [pM] of DLL3xCD3 bispecific antibody
constructs as measured in a 48-hour FACS-based cytotoxicity
assay with macaque T cell line 4119LnPx as effector cells
and CHO cells transfected with macaque DLL3 as target cells.
Rows 1-10: Antibody constructs according to the invention, which
bind to a DLL3 epitope comprised within the region as depicted in
SEQ ID NO: 260. (Rows 1-7: Antibody constructs binding to a DLL3
epitope comprised within the EGF-3 region. Rows 8-10: Antibody
constructs binding to a DLL3 epitope comprised within the EGF-4
region.) Rows 11-14: Antibody constructs binding to a DLL3 epitope
which is comprised within the EGF-5/[EGF-6] region.

| | DLL3xCD3 bispecific | EC50 |
|---|---|---|
| Row | antibody construct | [pM] |
| 1 | DLL3-4 | 36 |
| 2 | DLL3-5 | 42 |
| 3 | DLL3-6 | 40 |
| 4 | DLL3-7 | 101 |
| 5 | DLL3-8 | 44 |
| 6 | DLL3-9 | 58 |
| 7 | DLL3-10 | 42 |
| 8 | DLL3-13 | 65 |
| 9 | DLL3-14 | 28 |
| 10 | DLL3-15 | 32 |
| 11 | DLL3-18 | 134 |
| 12 | DLL3-19 | 66 |
| 13 | DLL3-20 | 231 |
| 14 | DLL3-21 | 86 |

### Example 9

[0509] Monomer to Dimer Conversion after (i) Three Freeze/Thaw Cycles and (ii) 7 Days of Incubation at 250 μg/ml

[0510] Bispecific DLL3×CD3 antibody monomeric construct were subjected to different stress conditions followed by high performance SEC to determine the percentage of initially monomeric antibody construct, which had been converted into dimeric antibody construct.

[0511] (i) 25 μg of monomeric antibody construct were adjusted to a concentration of 250 μg/ml with generic formulation buffer and then frozen at −80° C. for 30 min followed by thawing for 30 min at room temperature. After three freeze/thaw cycles the dimer content was determined by HP-SEC.

[0512] (ii) 25 μg of monomeric antibody construct were adjusted to a concentration of 250 μg/ml with generic formulation buffer followed by incubation at 37° C. for 7 days. The dimer content was determined by HP-SEC.

[0513] A high resolution SEC Column TSK Gel G3000 SWXL (Tosoh, Tokyo-Japan) was connected to an Äkta Purifier 10 FPLC (GE Lifesciences) equipped with an A905 Autosampler. Column equilibration and running buffer consisted of 100 mM KH2PO4-200 mM Na2SO4 adjusted to pH 6.6. The antibody solution (25 μg protein) was applied to the equilibrated column and elution was carried out at a flow rate of 0.75 ml/min at a maximum pressure of 7 MPa. The whole run was monitored at 280, 254 and 210 nm optical absorbance. Analysis was done by peak integration of the 210 nm signal recorded in the Äkta Unicorn software run evaluation sheet. Dimer content was calculated by dividing the area of the dimer peak by the total area of monomer plus dimer peak.

[0514] The results are shown in Table 10 below. The DLL3×CD3 bispecific antibody constructs of the invention presented with dimer percentages of 0.0% after three freeze/thaw cycles, and with dimer percentages of 2% after 7 days of incubation at 37° C.

TABLE 10
Percentage of monomeric versus dimeric DLL3xCD3 bispecific
antibody constructs as determined by High Performance
Size Exclusion Chromatography (HP-SEC).

| DLL3xCD3 | Percentage of dimer | Percentage of dimer |
|---|---|---|
| bispecific | after three freeze/ | after 7 days of |
| antibody construct | thaw cycles | incubation at 37° C. |
| DLL3-4 | 0.7 | 0.0 |
| DLL3-5 | 1.5 | 0.0 |
| DLL3-6 | 1.3 | 0.0 |
| DLL3-7 | 1.2 | 0.0 |
| DLL3-8 | 1.5 | 0.0 |
| DLL3-9 | 1.8 | 0.0 |
| DLL3-10 | 0.6 | 0.0 |
| DLL3-13 | 1.6 | 0.0 |
| DLL3-14 | 0.4 | 0.0 |
| DLL3-15 | 1.2 | 0.0 |

### Example 10

### Thermostability

[0515] Antibody aggregation temperature was determined as follows: 40 μl of antibody construct solution at 250 μg/ml were transferred into a single use cuvette and placed in a Wyatt Dynamic Light Scattering device DynaPro Nanostar (Wyatt). The sample was heated from 40° C. to 70° C. at a heating rate of 0.5° C./min with constant acquisition of the measured radius. Increase of radius indicating melting of the protein and aggregation was used by the software package delivered with the DLS device to calculate the aggregation temperature of the antibody construct.

[0516] All tested DLL3×CD3 bispecific antibody constructs of the invention showed thermal stability with aggregation temperatures ≥45° C., as shown in Table 11 below. The group of antibody constructs binding to an epitope of DLL3 which is comprised within the EGF-4 region (as depicted in SEQ ID NO: 259) even had a thermal stability of ≥50° C., more precisely, of ≥54° C.

TABLE 11
Thermostability of the bispecific antibody constructs
as determined by DLS (dynamic light scattering)

| DLL3xCD3 | Thermostability |
|---|---|
| bispecific | (DLS ° C. |
| antibody construct | aggregation) |
| DLL3-4 | 59.3 |
| DLL3-5 | 45.4 |
| DLL3-6 | 58.8 |
| DLL3-7 | 58.2 |
| DLL3-8 | 49.8 |
| DLL3-9 | 49.6 |
| DLL3-10 | 52.9 |
| DLL3-13 | 54.0 |
| DLL3-14 | 57.0 |
| DLL3-15 | 56.3 |

### Example 11

[0517] Stability after Incubation for 24 Hours in Human Plasma

[0518] Purified bispecific antibody constructs were incubated at a ratio of 1:5 in a human plasma pool at 37° C. for 96 hours at a final concentration of 2-20 μg/ml. After plasma incubation the antibody constructs were compared in a 51-chromium release assay with stimulated enriched human CD8+ T cells and human DLL3-transfected CHO cells at a starting concentration of 0.01-0.1 μg/ml and with an effector to target cell (E:T) ratio of 10:1 (assay as described in Example 8.1). Non-incubated, freshly thawed bispecific antibody constructs were included as controls.

[0519] The results are shown in Table 12 below; exemplary results for the two antibody constructs DLL-4 and DLL-14 are also shown in FIG. 5. All tested antibody constructs had a very favourable plasma stability (EC50 plasma/EC50 control) of 2.5. The group of antibody constructs binding to an epitope of DLL3 which is comprised within the EGF-4 region (as depicted in SEQ ID NO: 259) even had a plasma stability of 1.5, more precisely, of 1.1.

TABLE 12
EC50 values of the antibody constructs with and without
plasma incubation and calculated plasma/control value

| DLL3xCD3 | | | Plasma to Control |
|---|---|---|---|
| bispecific | EC₅₀ [pM] | | ratio (EC₅₀ plasma/ |
| antibody construct | w/plasma | w/o plasma | EC₅₀ control) |
| DLL3-4 | 3.6 | 3.8 | 0.9 |
| DLL3-5 | 5.4 | 4.2 | 1.3 |
| DLL3-6 | 4.8 | 2.1 | 2.3 |
| DLL3-7 | 2.7 | 2.2 | 1.2 |
| DLL3-8 | 1.0 | 1.2 | 0.8 |
| DLL3-9 | 1.2 | 1.2 | 1.0 |
| DLL3-10 | 2.5 | 1.4 | 1.8 |
| DLL3-13 | 2.0 | 1.8 | 1.1 |
| DLL3-14 | 4.8 | 5.4 | 0.9 |
| DLL3-15 | 7.8 | 9.8 | 0.8 |

### Example 12

[0520] Turbidity at 2500 μg/ml Antibody Concentration

[0521] 1 ml of purified antibody construct solution of a concentration of 250 μg/ml was concentrated by spin concentration units to 2500 μg/ml. After 16 h storage at 5° C. the turbidity of the antibody solution was determined by OD340 nm optical absorption measurement against the generic formulation buffer.

[0522] The results are shown in Table 13 below. All tested antibody constructs have a very favourable turbidity of ≤0.1, with the exception of one construct with a turbidity slightly above 0.1. The group of antibody constructs binding to an epitope of DLL3 which is comprised within the EGF-4 region (as depicted in SEQ ID NO: 259) even have a turbidity of ≤0.08.

TABLE 13
Turbidity of the antibody constructs after
concentration to 2.5 mg/ml over night

| DLL3xCD3 | Turbidity at |
|---|---|
| bispecific | 2500 μg/ml |
| antibody construct | [OD340] |
| DLL3-4 | 0.073 |
| DLL3-5 | 0.106 |
| DLL3-6 | 0.080 |
| DLL3-7 | 0.089 |
| DLL3-8 | 0.069 |
| DLL3-9 | 0.085 |
| DLL3-10 | 0.091 |
| DLL3-13 | 0.075 |
| DLL3-14 | 0.073 |
| DLL3-15 | 0.078 |

### Example 13

### Protein Homogeneity by High Resolution Cation Exchange Chromatography

[0523] The protein homogeneity the antibody constructs of the invention was analyzed by high resolution cation exchange chromatography CIEX.

[0524] 50 μg of antibody construct monomer were diluted with 50 ml binding buffer A (20 mM sodium dihydrogen phosphate, 30 mM NaCl, 0.01% sodium octanate, pH 5.5), and 40 ml of this solution were applied to a 1 ml BioPro SP-F column (YMC, Germany) connected to an Äkta Micro FPLC device (GE Healthcare, Germany). After sample binding, a wash step with further binding buffer was carried out. For protein elution, a linear increasing salt gradient using buffer B (20 mM sodium dihydrogen phosphate, 1000 mM NaCl, 0.01% sodium octanate, pH 5.5) up to 50% percent buffer B was applied over 10 column volumes. The whole run was monitored at 280, 254 and 210 nm optical absorbance. Analysis was done by peak integration of the 280 nm signal recorded in the Äkta Unicorn software run evaluation sheet.

[0525] The results are shown in Table 14 below. All tested antibody constructs have a very favourable homogeneity of 80% (area under the curve (=AUC) of the main peak), The group of antibody constructs binding to an epitope of DLL3 which is comprised within the EGF-3 region (as depicted in SEQ ID NO: 258) even have a homogeneity of 90%.

TABLE 14
Protein homogeneity of the antibody
constructs (% AUC of main peak)

| DLL3xCD3 | Protein |
|---|---|
| bispecific | homogeneity % |
| antibody construct | AUC of main peak |
| DLL3-4 | 96 |
| DLL3-5 | 100 |
| DLL3-6 | 95 |
| DLL3-7 | 93 |
| DLL3-8 | 100 |
| DLL3-9 | 93 |
| DLL3-10 | 90 |
| DLL3-13 | 100 |
| DLL3-14 | 100 |
| DLL3-15 | 83 |

### Example 14

### Surface Hydrophobicity as Measured by HIC Butyl

[0526] The surface hydrophobicity of bispecific antibody constructs of the invention was tested in Hydrophobic Interaction Chromatography HIC in flow-through mode.

[0527] 50 μg of antibody construct monomer were diluted with generic formulation buffer to a final volume of 500 μl (10 mM citric acid, 75 mM lysine HCl, 4% trehalose, pH 7.0) and applied to a 1 ml Butyl Sepharose FF column (GE Healthcare, Germany) connected to a Äkta Purifier FPLC system (GE Healthcare, Germany). The whole run was monitored at 280, 254 and 210 nm optical absorbance. Analysis was done by peak integration of the 280 nm signal recorded in the Äkta Unicorn software run evaluation sheet. Elution behavior was evaluated by comparing area and velocity of rise and decline of protein signal thereby indicating the strength of interaction of the BiTE albumin fusion with the matrix.

[0528] The antibody constructs had a good elution behaviour, which was mostly rapid and complete.

### Example 15

### Potency Gap Between the Monomeric and the Dimeric Isoform of Bispecific Antibody Constructs

[0529] In order to determine the difference in cytotoxic activity between the monomeric and the dimeric isoform of individual DLL3×CD3 bispecific antibody constructs (referred to as potency gap), an 18 hour 51-chromium release cytotoxicity assay was carried out as described hereinabove (Example 8.1) with purified bispecific antibody construct monomer and dimer. Effector cells were stimulated enriched human CD8+ T cells. Target cells were hu DLL3 transfected CHO cells. Effector to target cell (E:T) ratio was 10:1. The potency gap was calculated as ratio between EC50 values.

[0530] The results are shown in Table 15 below; exemplary results for the two antibody constructs DLL-4 and DLL-14 are also shown in FIG. 6. Potency gaps of the tested DLL3×CD3 bispecific antibody constructs were between 0.2 and 1.0. There is hence no substantially more active dimer compared to its respective monomer.

TABLE 15
Potency gap between the monomeric and the dimeric isoform

| DLL3xCD3 | EC₅₀ | EC₅₀ | Ratio |
|---|---|---|---|
| bispecific | [pM] | [pM] | EC₅₀ monomer/ |
| antibody construct | monomer | dimer | EC₅₀ dimer |
| DLL3-4 | 3.8 | 5.7 | 0.7 |
| DLL3-5 | 4.2 | 11 | 0.4 |
| DLL3-6 | 2.1 | 13 | 0.2 |
| DLL3-7 | 2.2 | 4.2 | 0.5 |
| DLL3-8 | 1.2 | 3.4 | 0.4 |
| DLL3-9 | 1.2 | 3.8 | 0.3 |
| DLL3-10 | 1.4 | 1.4 | 1.0 |
| DLL3-13 | 1.8 | 3.0 | 0.6 |
| DLL3-14 | 5.4 | 8.7 | 0.6 |
| DLL3-15 | 9.8 | 25 | 0.4 |

### Example 16

### In Vitro Internalization Assay

[0531] Changes in the potency of the DLL3×CD3 bispecific antibody construct as a function of preincubation of the construct on the target cells in the absence of T cells were measured. If the antibody construct is internalized, it should undergo lysosomal degradation. The effective concentration should decrease with time, and thus the apparent potency should decrease as well. The effect is observed with other targets, for which this is a known phenomenon, but no impact was observed with the DLL3×CD3 bispecific antibody construct. The assay was carried out as follows:

[0532] T cells were counted and diluted to a concentration of 1×10⁵/ml in assay media. SHP-77 cells were counted and plated at 2500 cells per well (cpw). The antibody construct was diluted serially 1:2 (with Bravo), at a starting concentration of 100 nM. The antibody construct was added to the culture assay plates to allow for 0 hours, 1 hour or 2 hours of incubation prior to addition of the T cells. Then the T cells were plated at 25000 cpw, and the assay was incubated for 48 hours at 37° C. SHP-77 cell survival was analyzed with the Steady-Glo® system (25 μl/well). The results are shown in FIG. 7 and suggest no significant internalization of the antibody construct DLL3-4×CD3 (12C).

### Example 17

### Shedding Study

[0533] In order to analyze whether the cytotoxic activity of the DLL3×CD3 bispecific antibody constructs of the invention is significantly impaired by the presence of shed DLL, the following assay was carried out: T cells were counted and diluted to a concentration of 1×10⁵/ml in assay media. SHP-77 cells were counted and diluted to a concentration of 1.25×10⁵/ml in assay media with increasing concentrations of soluble DLL3 between 0.3 nM and 12 nM. SHP-77 cells were plated at 2500 cells per well (cpw), and T cells were added at 25000 cpw. The antibody construct was diluted serially 1:2 (with Bravo), and added to the culture assay (with Bravo). Incubation occurred for 48 hours at 37° C. SHP-77 cell survival was analyzed with the Steady-Glo® system (25 μl/well).

### Example 18

### Mouse Xenograft Efficacy Study

[0534] The anti-tumor activity of an HLE DLL3×CD3 bispecific antibody construct (SEQ ID NO: 517) was tested in a model of female NOD/SCID mice which were subcutaneously injected on day 1 of the study with 5×10⁶ human DLL3 positive SCLC (SHP-77 luc) or 5×10⁶ human DLL3 positive melanoma (WM_266-4) cells. Effector cells (2×10⁷ in vitro expanded and activated living human CD3+ T cells) were injected intraperitoneally on day 12. Treatment start was on day 16 (WM_266-4) or on day 18 (SHP-77 luc). The antibody construct was administered four times every five days (q5dx4) by i.v. bolus injections. The treatment groups were as follows:
[0535] SCLC model (SHP-77 luc)/7 mice per group
   [0536] Vehicle-treated group with T cells
   [0537] DLL3×CD3 bispecific antibody construct: 10 mg/kg per administration
[0538] Melanoma model (WM266-4)/9 mice per group
   [0539] Vehicle-treated group with T cells
   [0540] DLL3×CD3 bispecific antibody construct: 10 mg/kg per administration
   [0541] DLL3×CD3 bispecific antibody construct: 2 mg/kg per administration

[0542] Tumors were measured by caliper during the study and progress evaluated by intergroup comparison of tumor volumes (TV). The tumor growth inhibition T/C [%] on day x is determined by calculating the tumor volume as T/C (%)=100×(median TV of analyzed group)/(median TV of control group), and the calculated values are depicted in the following table 16:

TABLE 16
T/C values of the mouse xenograft studies
with SHP-77 luc cells and WM266-4 cells

| | T/C (%) | T/C (%) | T/C (%) |
|---|---|---|---|
| Day of | SHP-77 model | WM266-4 model | WM266-4 model |
| Study | 10 mg/kg | 10 mg/kg | 2 mg/kg |
| 15 | 103 | 101 | 101 |
| 17 | 92 | 76 | 77 |
| 20 | 64 | 42 | 47 |
| 23 | 50 | 36 | 38 |
| 26 | 52 | 31 | 35 |
| 29 | 34 | 46 | 40 |
| 31 | 33 | 56 | 55 |
| 33 | 30 | 64 | 75 |
| 36 | 24 | n.a | n.a |
| 38 | 19 | n.a | n.a |

[0543] The results are furthermore shown in FIGS. 8A and 8B. Significant tumor growth inhibition was shown in both tumor models and at both tested dose levels of 2 and 10 mg/kg.

### Example 19

### Cyno Exploratory Toxicology Study

[0544] An exploratory toxicology study was carried out with a non half-life extended DLL3×CD3 bispecific antibody construct (SEQ ID NO: 554). Three female cynomolgus monkeys were dosed via continuous i.v. infusion for 16 days (5, 15, and 45 μg/kg/day for 3 days each, followed by 100 μg/kg/day for 7 days). No test article-related clinical observations, changes in body temperature, food consumption or body weight were observed.

[0545] Consistent with expectations for the pharmacology of a DLL3×CD3 bispecific antibody construct, circulating T lymphocyte populations (total T-lymphocytes, T-helper and T-cytotoxic lymphocytes, NK cells, B-lymphocytes, and CD25+ activated T-lymphocytes) were decreased on the first day of dosing and remained lower throughout the duration of the study in all animals. Activation markers (CD69 and CD25 on activated T cells) were increased on day 1, but not at later time points in the study.

[0546] To summarize, the DLL3×CD3 bispecific antibody construct was very well tolerated even at the highest dose tested (100 μg/kg/d, >300×EC₅₀).

### Example 20

### Cyno PK Studys

[0547] A cyno PK study was performed with naïve male cynomolgus monkeys. Three different albumin-fused DLL3×CD3 (12C) bispecific antibody constructs (DLL3-4, DLL3-6 and DLL3-14) were administered as i.v. single bolus at a concentration of 12 μg/kg. For each of the molecules a group of two animals was used.

[0548] A separate cyno PK study was performed under the same conditions, but with DLL3-4 in different Fc fusion versions.

[0549] Blood samples were collected pre-dose and at 0.05, 0.5, 1, 4, 8, 24, 48, 72, 120, 168, 240, and 336 hours post-dose. Serum was prepared for determination of serum concentrations of the molecules in an immunoassay. The assay was performed by capturing the antibody constructs via their target moiety, while an antibody directed against the CD3-binding part of the construct was used for detection. The serum concentration-time profiles were used to determine PK parameters. The pharmacokinetic parameters were determined using standard non-compartmental analysis (NCA) methods. The following PK parameters were assessed: AUC_{inf} (Area under the serum concentration-time curve), Vₛₛ (volume of distribution at steady state), CL (systemic clearance) and terminal t_{1/2} (terminal half-life). For all antibody constructs, serum levels were quantifiable for all time points in all animals after their administration. No clinical observations were made in any of the treated animals.

[0550] The pharmacokinetics of the tested antibody constructs are shown in FIGS. 9A and 9B, and the PK parameters are summarized as mean of n=2 in table 17 below.

[0551] The albumin-fused constructs showed a favorable PK profile consistent with a once or twice weekly dosing schedule in a human patient. An even more favorable PK profile supporting once weekly dosing or even every other week dosing was observed with an Fc fusion construct (scFc).

TABLE 17
Pharmacokinetic parameters of HLE variants of DLL3xCD3
bispecific antibody constructs in cynomolgus monkeys

| | AUC_{inf} | V_{SS} | CL | t_{1/2} |
|---|---|---|---|---|
| Antibody construct | [ng * h/mL] | [mL/kg] | [mL/h/kg] | [h] |
| DLL3-4 x I2C HALB | 20,669 | 70 | 0.58 | 98 |
| DLL3-6 x I2C HALB | 20,228 | 67 | 0.59 | 103 |
| DLL3-14 x I2C HALB | 21,597 | 107 | 0.55 | 154 |
| DLL3-4 x I2C scFc | 29,746 | 118 | 0.40 | 213 |
| DLL3-4 (cc) x I2C scFc | 24,769 | 144 | 0.48 | 234 |
| DLL3-4 x I2C hetero Fc | 14,639 | 166 | 0.82 | 173 |

TABLE 18

| SEQ | | | | |
|---|---|---|---|---|
| ID | DLL3 | Desig- | Format / | |
| NO | epitope | nation | Source | Amino acid sequence |
| 1 | | DLL3-1 | VH CDR1 | DYGIH |
| 2 | | DLL3-1 | VH CDR2 | VISYHGSNKYYARSVKG |
| 3 | | DLL3-1 | VH CDR3 | EIPFGMDV |
| 4 | | DLL3-1 | VL CDR1 | RSSQSLLHSDGYNYLD |
| 5 | | DLL3-1 | VL CDR2 | LGSNRAS |
| 6 | | DLL3-1 | VL CDR3 | MQALQTPLT |
| 7 | | DLL3-1 | VH | QVQLVESGGGVVQSGRSLRLSCAASGFTFSDYGIHWVRQAPGKGLEWVAVISYHGSNKYYAR |
| | | | | SVKGRFTVSRDNSKNTLYLQMNSLRAEDTAVYYCAREIPFGMDVWGQGTTVTVSS |
| 8 | | DLL3-1 | VL | DIVMTQTPLSLPVTPGEPASISCRSSQSLLHSDGYNYLDWYLQKPGQSPQLLIYLGSNRASG |
| | | | | VPDRFSGSGSGTDFTLTISRVEAEDVGVYYCMQALQTPLTFGGGTKVDIK |
| 9 | N-term | DLL3-1 | scFv | QVQLVESGGGVVQSGRSLRLSCAASGFTFSDYGIHWVRQAPGKGLEWVAVISYHGSNKYYAR |
| | | | | SVKGRFTVSRDNSKNTLYLQMNSLRAEDTAVYYCAREIPFGMDVWGQGTTVTVSSGGGGSGG |
| | | | | GGSGGGGSDIVMTQTPLSLPVTPGEPASISCRSSQSLLHSDGYNYLDWYLQKPGQSPQLLIY |
| | | | | LGSNRASGVPDRFSGSGSGTDFTLTISRVEAEDVGVYYCMQALQTPLTFGGGTKVDIK |
| 10 | | DLL3-1 | bispecific | QVQLVESGGGVVQSGRSLRLSCAASGFTFSDYGIHWVRQAPGKGLEWVAVISYHGSNKYYAR |
| | | xI2C | molecule | SVKGRFTVSRDNSKNTLYLQMNSLRAEDTAVYYCAREIPFGMDVWGQGTTVTVSSGGGGSGG |
| | | | | GGSGGGGSDIVMTQTPLSLPVTPGEPASISCRSSQSLLHSDGYNYLDWYLQKPGQSPQLLIY |
| | | | | LGSNRASGVPDRFSGSGSGTDFTLTISRVEAEDVGVYYCMQALQTPLTFGGGTKVDIKSGGG |
| | | | | GSEVQLVESGGGLVQPGGSLKLSCAASGFTFNKYAMNWVRQAPGKGLEWVARIRSKYNNYAT |
| | | | | YYADSVKDRFTISRDDSKNTAYLQMNNLKTEDTAVYYCVRHGNFGNSYISYWAYWGQGTLVT |
| | | | | VSSGGGGSGGGGSGGGGSQTVVTQEPSLTVSPGGTVTLTCGSSTGAVTSGNYPNWVQQKPGQ |
| | | | | APRGLIGGTKFLAPGTPARFSGSLLGGKAALTLSGVQPEDEAEYYCVLWYSNRWVFGGGTKL |
| | | | | TVL |
| 11 | | DLL3-2 | VH CDR1 | GYYMH |
| 12 | | DLL3-2 | VH CDR2 | WINPNSGDTNYAQKFQG |
| 13 | | DLL3-2 | VH CDR3 | DANIAALDAFEI |
| 14 | | DLL3-2 | VL CDR1 | RASQSISSYLN |
| 15 | | DLL3-2 | VL CDR2 | AASSLQS |
| 16 | | DLL3-2 | VL CDR3 | QQSYSTPLT |
| 17 | | DLL3-2 | VH | QVQLVQSGAEVKKPGASVKVSCKASGYTFTGYYMHWVRQAPGQGLEWMGWINPNSGDTNYAQ |
| | | | | KFQGRVTMTRDTSISTAYMELSRLTSDDTAVYYCARDANIAALDAFEIWGQGTMVTVSS |
| 18 | | DLL3-2 | VL | DIQMTQSPSSLSASVGDRVTITCRASQSISSYLNWYQQKPGKAPKLLIYAASSLQSGVPSRF |
| | | | | SGSGSGTDFTLTISSLQPEDFATYYCQQSYSTPLTFGGGTKVEIK |
| 19 | N-term. | DLL3-2 | scFv | QVQLVQSGAEVKKPGASVKVSCKASGYTFTGYYMHWVRQAPGQGLEWMGWINPNSGDTNYAQ |
| | | | | KFQGRVTMTRDTSISTAYMELSRLTSDDTAVYYCARDANIAALDAFEIWGQGTMVTVSSGGG |
| | | | | GSGGGGSGGGGSDIQMTQSPSSLSASVGDRVTITCRASQSISSYLNWYQQKPGKAPKLLIYA |
| | | | | ASSLQSGVPSRFSGSGSGTDFTLTISSLQPEDFATYYCQQSYSTPLTFGGGTKVEIK |
| 20 | | DLL3-2 | bispecific | QVQLVQSGAEVKKPGASVKVSCKASGYTFTGYYMHWVRQAPGQGLEWMGWINPNSGDTNYAQ |
| | | xI2C | molecule | KFQGRVTMTRDTSISTAYMELSRLTSDDTAVYYCARDANIAALDAFEIWGQGTMVTVSSGGG |
| | | | | GSGGGGSGGGGSDIQMTQSPSSLSASVGDRVTITCRASQSISSYLNWYQQKPGKAPKLLIYA |
| | | | | ASSLQSGVPSRFSGSGSGTDFTLTISSLQPEDFATYYCQQSYSTPLTFGGGTKVEIKSGGGG |
| | | | | SEVQLVESGGGLVQPGGSLKLSCAASGFTFNKYAMNWVRQAPGKGLEWVARIRSKYNNYATY |
| | | | | YADSVKDRFTISRDDSKNTAYLQMNNLKTEDTAVYYCVRHGNFGNSYISYWAYWGQGTLVTV |
| | | | | SSGGGGSGGGGSGGGGSQTVVTQEPSLTVSPGGTVTLTCGSSTGAVTSGNYPNWVQQKPGQA |
| | | | | PRGLIGGTKFLAPGTPARFSGSLLGGKAALTLSGVQPEDEAEYYCVLWYSNRWVFGGGTKLT |
| | | | | VL |
| 21 | | DLL3-3 | VH CDR1 | SYGMH |
| 22 | | DLL3-3 | VH CDR2 | VISYHGRDTYYARSVKG |
| 23 | | DLL3-3 | VH CDR3 | DGATVTSYYYSGMDV |
| 24 | | DLL3-3 | VL CDR1 | RASQGISNYLA |
| 25 | | DLL3-3 | VL CDR2 | LASSLQS |
| 26 | | DLL3-3 | VL CDR3 | QQYNFYPFT |
| 27 | | DLL3-3 | VH | QVQLVESGGGVVQPGRSLRLSCAASGFTFSSYGMHWVRQAPGKGLEWVAVISYHGRDTYYAR |
| | | | | SVKGRFTISRDNSKNTLYLHMNSLRAEDTAVYYCARDGATVTSYYYSGMDVWGQGTTVTVSS |
| | | | | K |
| 28 | | DLL3-3 | VL | DIQMTQSPSSLSASVGDRVTITCRASQGISNYLAWFQQKPGKAPKSLIYLASSLQSGVPSKF |
| | | | | SGSGSGTDFTLTISSLQPEDFATYYCQQYNFYPFTFGPGTKVDIK |
| 29 | EGF-1 | DLL3-3 | scFv | QVQLVESGGGVVQPGRSLRLSCAASGFTFSSYGMHWVRQAPGKGLEWVAVISYHGRDTYYAR |
| | | | | SVKGRFTISRDNSKNTLYLHMNSLRAEDTAVYYCARDGATVTSYYYSGMDVWGQGTTVTVSS |
| | | | | GGGGSGGGGSGGGGSDIQMTQSPSSLSASVGDRVTITCRASQGISNYLAWFQQKPGKAPKSL |
| | | | | IYLASSLQSGVPSKFSGSGSGTDFTLTISSLQPEDFATYYCQQYNFYPFTFGPGTKVDIK |
| 30 | | DLL3-3 | bispecific | QVQLVESGGGVVQPGRSLRLSCAASGFTFSSYGMHWVRQAPGKGLEWVAVISYHGRDTYYAR |
| | | xI2C | molecule | SVKGRFTISRDNSKNTLYLHMNSLRAEDTAVYYCARDGATVTSYYYSGMDVWGQGTTVTVSS |
| | | | | GGGGSGGGGSGGGGSDIQMTQSPSSLSASVGDRVTITCRASQGISNYLAWFQQKPGKAPKSL |
| | | | | IYLASSLQSGVPSKFSGSGSGTDFTLTISSLQPEDFATYYCQQYNFYPFTFGPGTKVDIKSG |
| | | | | GGGSEVQLVESGGGLVQPGGSLKLSCAASGFTFNKYAMNWVRQAPGKGLEWVARIRSKYNNY |
| | | | | ATYYADSVKDRFTISRDDSKNTAYLQMNNLKTEDTAVYYCVRHGNFGNSYISYWAYWGQGTL |
| | | | | VTVSSGGGGSGGGGSGGGGSQTVVTQEPSLTVSPGGTVTLTCGSSTGAVTSGNYPNWVQQKP |
| | | | | GQAPRGLIGGTKFLAPGTPARFSGSLLGGKAALTLSGVQPEDEAEYYCVLWYSNRWVFGGGT |
| | | | | KLTVL |
| 31 | | DLL3-4 | VH CDR1 | SYYWS |
| 32 | | DLL3-4 | VH CDR2 | YVYYSGTTNYNPSLKS |
| 33 | | DLL3-4 | VH CDR3 | IAVTGFYFDY |
| 34 | | DLL3-4 | VL CDR1 | RASQRVNNNYLA |
| 35 | | DLL3-4 | VL CDR2 | GASSRAT |
| 36 | | DLL3-4 | VL CDR3 | QQYDRSPLT |
| 37 | | DLL3-4 | VH | QVQLQESGPGLVKPSETLSLTCTVSGGSISSYYWSWIRQPPGKGLEWIGYVYYSGTTNYNPS |
| | | | | LKSRVTISVDTSKNQFSLKLSSVTAADTAVYYCASIAVTGFYFDYWGQGTLVTVSS |
| 38 | | DLL3-4 | VL | EIVLTQSPGTLSLSPGERVTLSCRASQRVNNNYLAWYQQRPGQAPRLLIYGASSRATGIPDR |
| | | | | FSGSGSGTDFTLTISRLEPEDFAVYYCQQYDRSPLTFGGGTKLEIK |
| 39 | EGF-3 | DLL3-4 | scFv | QVQLQESGPGLVKPSETLSLTCTVSGGSISSYYWSWIRQPPGKGLEWIGYVYYSGTTNYNPS |
| | | | | LKSRVTISVDTSKNQFSLKLSSVTAADTAVYYCASIAVTGFYFDYWGQGTLVTVSSGGGGSG |
| | | | | GGGSGGGGSEIVLTQSPGTLSLSPGERVTLSCRASQRVNNNYLAWYQQRPGQAPRLLIYGAS |
| | | | | SRATGIPDRFSGSGSGTDFTLTISRLEPEDFAVYYCQQYDRSPLTFGGGTKLEIK |
| 40 | | DLL3-4 | bispecific | QVQLQESGPGLVKPSETLSLTCTVSGGSISSYYWSWIRQPPGKGLEWIGYVYYSGTTNYNPS |
| | | xI2C | molecule | LKSRVTISVDTSKNQFSLKLSSVTAADTAVYYCASIAVTGFYFDYWGQGTLVTVSSGGGGSG |
| | | | | GGGSGGGGSEIVLTQSPGTLSLSPGERVTLSCRASQRVNNNYLAWYQQRPGQAPRLLIYGAS |
| | | | | SRATGIPDRFSGSGSGTDFTLTISRLEPEDFAVYYCQQYDRSPLTFGGGTKLEIKSGGGGSE |
| | | | | VQLVESGGGLVQPGGSLKLSCAASGFTFNKYAMNWVRQAPGKGLEWVARIRSKYNNYATYYA |
| | | | | DSVKDRFTISRDDSKNTAYLQMNNLKTEDTAVYYCVRHGNFGNSYISYWAYWGQGTLVTVSS |
| | | | | GGGGSGGGGSGGGGSQTVVTQEPSLTVSPGGTVTLTCGSSTGAVTSGNYPNWVQQKPGQAPR |
| | | | | GLIGGTKFLAPGTPARFSGSLLGGKAALTLSGVQPEDEAEYYCVLWYSNRWVFGGGTKLTVL |
| 41 | | DLL3-5 | VH CDR1 | SYYWS |
| 42 | | DLL3-5 | VH CDR2 | YIYYSGRTNYYPSLKS |
| 43 | | DLL3-5 | VH CDR3 | IAVAGFFFDY |
| 44 | | DLL3-5 | VL CDR1 | RASQSVNKNYLA |
| 45 | | DLL3-5 | VL CDR2 | GASSRAT |
| 46 | | DLL3-5 | VL CDR3 | QQYDRSPLT |
| 47 | | DLL3-5 | VH | QVQLQESGPGLVKPSETLSLTCTVSGGSISSYYWSWIRQPPGKGLEWIGYIYYSGRTNYYPS |
| | | | | LKSRVTISIDTSKNQFSLKLSSVTAADTAVYYCARIAVAGFFFDYWGQGTLVTVSS |
| 48 | | DLL3-5 | VL | EIVLTQSPGTLSLSPGERATLSCRASQSVNKNYLAWYQQKPGQAPRLLIYGASSRATGIPDR |
| | | | | FSGSGSGTDFTLTISRLEPEDFAVYYCQQYDRSPLTFGGGTKLEIK |
| 49 | EGF-3 | DLL3-5 | scFv | QVQLQESGPGLVKPSETLSLTCTVSGGSISSYYWSWIRQPPGKGLEWIGYIYYSGRTNYYPS |
| | | | | LKSRVTISIDTSKNQFSLKLSSVTAADTAVYYCARIAVAGFFFDYWGQGTLVTVSSGGGGSG |
| | | | | GGGSGGGGSEIVLTQSPGTLSLSPGERATLSCRASQSVNKNYLAWYQQKPGQAPRLLIYGAS |
| | | | | SRATGIPDRFSGSGSGTDFTLTISRLEPEDFAVYYCQQYDRSPLTFGGGTKLEIK |
| 50 | | DLL3-5 | bispecific | QVQLQESGPGLVKPSETLSLTCTVSGGSISSYYWSWIRQPPGKGLEWIGYIYYSGRTNYYPS |
| | | xI2C | molecule | LKSRVTISIDTSKNQFSLKLSSVTAADTAVYYCARIAVAGFFFDYWGQGTLVTVSSGGGGSG |
| | | | | GGGSGGGGSEIVLTQSPGTLSLSPGERATLSCRASQSVNKNYLAWYQQKPGQAPRLLIYGAS |
| | | | | SRATGIPDRFSGSGSGTDFTLTISRLEPEDFAVYYCQQYDRSPLTFGGGTKLEIKSGGGGSE |
| | | | | VQLVESGGGLVQPGGSLKLSCAASGFTFNKYAMNWVRQAPGKGLEWVARIRSKYNNYATYYA |
| | | | | DSVKDRFTISRDDSKNTAYLQMNNLKTEDTAVYYCVRHGNFGNSYISYWAYWGQGTLVTVSS |
| | | | | GGGGSGGGGSGGGGSQTVVTQEPSLTVSPGGTVTLTCGSSTGAVTSGNYPNWVQQKPGQAPR |
| | | | | GLIGGTKFLAPGTPARFSGSLLGGKAALTLSGVQPEDEAEYYCVLWYSNRWVFGGGTKLTVL |
| 51 | | DLL3-6 | VH CDR1 | SFYWS |
| 52 | | DLL3-6 | VH CDR2 | YIYYSGTTNYNPSLKS |
| 53 | | DLL3-6 | VH CDR3 | IAVAGFFFDY |
| 54 | | DLL3-6 | VL CDR1 | RASQSVNKNYLA |
| 55 | | DLL3-6 | VL CDR2 | GASSRAT |
| 56 | | DLL3-6 | VL CDR3 | QQYDRSPLT |
| 57 | | DLL3-6 | VH | QVQLQESGPGLVKPSETLSLTCTVSGASISSFYWSWIRQPPGKGLEWIGYIYYSGTTNYNPS |
| | | | | LKSRVTISVDTSKNQFSLKLSSVTAADTAVYYCARIAVAGFFFDYWGQGTLVTVSS |
| 58 | | DLL3-6 | VL | EIVLTQSPGTLSLSPGERATLSCRASQSVNKNYLAWYQQKPGQAPRLLIYGASSRATGIPDR |
| | | | | FSGSGSGTDFTLTISRLEPEDFAVYYCQQYDRSPLTFGGGTKVEIK |
| 59 | EGF-3 | DLL3-6 | scFv | QVQLQESGPGLVKPSETLSLTCTVSGASISSFYWSWIRQPPGKGLEWIGYIYYSGTTNYNPS |
| | | | | LKSRVTISVDTSKNQFSLKLSSVTAADTAVYYCARIAVAGFFFDYWGQGTLVTVSSGGGGSG |
| | | | | GGGSGGGGSEIVLTQSPGTLSLSPGERATLSCRASQSVNKNYLAWYQQKPGQAPRLLIYGAS |
| | | | | SRATGIPDRFSGSGSGTDFTLTISRLEPEDFAVYYCQQYDRSPLTFGGGTKVEIK |
| 60 | | DLL3-6 | bispecific | QVQLQESGPGLVKPSETLSLTCTVSGASISSFYWSWIRQPPGKGLEWIGYIYYSGTTNYNPS |
| | | xI2C | molecule | LKSRVTISVDTSKNQFSLKLSSVTAADTAVYYCARIAVAGFFFDYWGQGTLVTVSSGGGGSG |
| | | | | GGGSGGGGSEIVLTQSPGTLSLSPGERATLSCRASQSVNKNYLAWYQQKPGQAPRLLIYGAS |
| | | | | SRATGIPDRFSGSGSGTDFTLTISRLEPEDFAVYYCQQYDRSPLTFGGGTKVEIKSGGGGSE |
| | | | | VQLVESGGGLVQPGGSLKLSCAASGFTFNKYAMNWVRQAPGKGLEWVARIRSKYNNYATYYA |
| | | | | DSVKDRFTISRDDSKNTAYLQMNNLKTEDTAVYYCVRHGNFGNSYISYWAYWGQGTLVTVSS |
| | | | | GGGGSGGGGSGGGGSQTVVTQEPSLTVSPGGTVTLTCGSSTGAVTSGNYPNWVQQKPGQAPR |
| | | | | GLIGGTKFLAPGTPARFSGSLLGGKAALTLSGVQPEDEAEYYCVLWYSNRWVFGGGTKLTVL |
| 61 | | DLL3-7 | VH CDR1 | SFYWS |
| 62 | | DLL3-7 | VH CDR2 | YIYYSGTTNYNPSLKS |
| 63 | | DLL3-7 | VH CDR3 | IAVAGFFFDY |
| 64 | | DLL3-7 | VL CDR1 | RASQSVNKNYLA |
| 65 | | DLL3-7 | VL CDR2 | GASSRAT |
| 66 | | DLL3-7 | VL CDR3 | QQYDRSPLT |
| 67 | | DLL3-7 | VH | QVQLQESGPGLVKPSQTLSLTCTVSGASISSFYWSWIRQPPGKGLEWIGYIYYSGTTNYNPS |
| | | | | LKSRVTISVDTSKNQFSLKLSSVTAADTAVYYCARIAVAGFFFDYWGQGTLVTVSS |
| 68 | | DLL3-7 | VL | EIVLTQSPGTLSLSPGERATLSCRASQSVNKNYLAWYQQKPGQAPRLLIYGASSRATGIPDR |
| | | | | FSGSGSGTDFTLTISRLEPEDFAVYYCQQYDRSPLTFGGGTKVEIK |
| 69 | EGF-3 | DLL3-7 | scFv | QVQLQESGPGLVKPSQTLSLTCTVSGASISSFYWSWIRQPPGKGLEWIGYIYYSGTTNYNPS |
| | | | | LKSRVTISVDTSKNQFSLKLSSVTAADTAVYYCARIAVAGFFFDYWGQGTLVTVSSGGGGSG |
| | | | | GGGSGGGGSEIVLTQSPGTLSLSPGERATLSCRASQSVNKNYLAWYQQKPGQAPRLLIYGAS |
| | | | | SRATGIPDRFSGSGSGTDFTLTISRLEPEDFAVYYCQQYDRSPLTFGGGTKVEIK |
| 70 | | DLL3-7 | bispecific | QVQLQESGPGLVKPSQTLSLTCTVSGASISSFYWSWIRQPPGKGLEWIGYIYYSGTTNYNPS |
| | | xI2C | molecule | LKSRVTISVDTSKNQFSLKLSSVTAADTAVYYCARIAVAGFFFDYWGQGTLVTVSSGGGGSG |
| | | | | GGGSGGGGSEIVLTQSPGTLSLSPGERATLSCRASQSVNKNYLAWYQQKPGQAPRLLIYGAS |
| | | | | SRATGIPDRFSGSGSGTDFTLTISRLEPEDFAVYYCQQYDRSPLTFGGGTKVEIKSGGGGSE |
| | | | | VQLVESGGGLVQPGGSLKLSCAASGFTFNKYAMNWVRQAPGKGLEWVARIRSKYNNYATYYA |
| | | | | DSVKDRFTISRDDSKNTAYLQMNNLKTEDTAVYYCVRHGNFGNSYISYWAYWGQGTLVTVSS |
| | | | | GGGGSGGGGSGGGGSQTVVTQEPSLTVSPGGTVTLTCGSSTGAVTSGNYPNWVQQKPGQAPR |
| | | | | GLIGGTKFLAPGTPARFSGSLLGGKAALTLSGVQPEDEAEYYCVLWYSNRWVFGGGTKLTVL |
| 71 | | DLL3-8 | VH CDR1 | SFYWS |
| 72 | | DLL3-8 | VH CDR2 | YIYYSGTTNYNPSLKS |
| 73 | | DLL3-8 | VH CDR3 | IAVAGFFFDY |
| 74 | | DLL3-8 | VL CDR1 | RASQSVNKNYLA |
| 75 | | DLL3-8 | VL CDR2 | GASSRAT |
| 76 | | DLL3-8 | VL CDR3 | QQYDRSPLT |
| 77 | | DLL3-8 | VH | QVQLQEWGPGLVKPSETLSLTCTVSGASISSFYWSWIRQPPGKGLEWIGYIYYSGTTNYNPS |
| | | | | LKSRVTISVDTSKNQLSLKLSSVTAADTAVYYCARIAVAGFFFDYWGQGTLVTVSSK |
| 78 | | DLL3-8 | VL | EIVLTQSPGTLSLSPGERATLSCRASQSVNKNYLAWYQQKPGQAPRLLIYGASSRATGIPDR |
| | | | | FSGSGSGTDFTLTISRLEPEDFAVYYCQQYDRSPLTFGGGTKVDIK |
| 79 | EGF-3 | DLL3-8 | scFv | QVQLQEWGPGLVKPSETLSLTCTVSGASISSFYWSWIRQPPGKGLEWIGYIYYSGTTNYNPS |
| | | | | LKSRVTISVDTSKNQLSLKLSSVTAADTAVYYCARIAVAGFFFDYWGQGTLVTVSSGGGGSG |
| | | | | GGGSGGGGSEIVLTQSPGTLSLSPGERATLSCRASQSVNKNYLAWYQQKPGQAPRLLIYGAS |
| | | | | SRATGIPDRFSGSGSGTDFTLTISRLEPEDFAVYYCQQYDRSPLTFGGGTKVDIK |
| 80 | | DLL3-8 | bispecific | QVQLQEWGPGLVKPSETLSLTCTVSGASISSFYWSWIRQPPGKGLEWIGYIYYSGTTNYNPS |
| | | xI2C | molecule | LKSRVTISVDTSKNQLSLKLSSVTAADTAVYYCARIAVAGFFFDYWGQGTLVTVSSGGGGSG |
| | | | | GGGSGGGGSEIVLTQSPGTLSLSPGERATLSCRASQSVNKNYLAWYQQKPGQAPRLLIYGAS |
| | | | | SRATGIPDRFSGSGSGTDFTLTISRLEPEDFAVYYCQQYDRSPLTFGGGTKVDIKSGGGGSE |
| | | | | VQLVESGGGLVQPGGSLKLSCAASGFTFNKYAMNWVRQAPGKGLEWVARIRSKYNNYATYYA |
| | | | | DSVKDRFTISRDDSKNTAYLQMNNLKTEDTAVYYCVRHGNFGNSYISYWAYWGQGTLVTVSS |
| | | | | GGGGSGGGGSGGGGSQTVVTQEPSLTVSPGGTVTLTCGSSTGAVTSGNYPNWVQQKPGQAPR |
| | | | | GLIGGTKFLAPGTPARFSGSLLGGKAALTLSGVQPEDEAEYYCVLWYSNRWVFGGGTKLTVL |
| 81 | | DLL3-9 | VH CDR1 | SFYWS |
| 82 | | DLL3-9 | VH CDR2 | YIYYSGTTNYNPSLKS |
| 83 | | DLL3-9 | VH CDR3 | IAVAGFFFDY |
| 84 | | DLL3-9 | VL CDR1 | RASQSVNKNYLA |
| 85 | | DLL3-9 | VL CDR2 | GASSRAT |
| 86 | | DLL3-9 | VL CDR3 | QQYDRSPLT |
| 87 | | DLL3-9 | VH | QVQLQESGPGLVKPSETLSLTCTVSGASISSFYWSWIRQPPGKGLEWIGYIYYSGTTNYNPS |
| | | | | LKSRVTISVDTSKNQFSLKLSSVTAADTAVYYCARIAVAGFFFDYWGQGTLVTVSS |
| 88 | | DLL3-9 | VL | EIVLTQSPGTLSLSPGESATLSCRASQSVNKNYLAWYQQKPGQAPRLLIYGASSRATGIPDR |
| | | | | FSGSGSGTDFTLTISRLEPEDFAVYYCQQYDRSPLTFGGGTRLEIK |
| 89 | EGF-3 | DLL3-9 | scFv | QVQLQESGPGLVKPSETLSLTCTVSGASISSFYWSWIRQPPGKGLEWIGYIYYSGTTNYNPS |
| | | | | LKSRVTISVDTSKNQFSLKLSSVTAADTAVYYCARIAVAGFFFDYWGQGTLVTVSSGGGGSG |
| | | | | GGGSGGGGSEIVLTQSPGTLSLSPGESATLSCRASQSVNKNYLAWYQQKPGQAPRLLIYGAS |
| | | | | SRATGIPDRFSGSGSGTDFTLTISRLEPEDFAVYYCQQYDRSPLTFGGGTRLEIK |
| 90 | | DLL3-9 | bispecific | QVQLQESGPGLVKPSETLSLTCTVSGASISSFYWSWIRQPPGKGLEWIGYIYYSGTTNYNPS |
| | | xI2C | molecule | LKSRVTISVDTSKNQFSLKLSSVTAADTAVYYCARIAVAGFFFDYWGQGTLVTVSSGGGGSG |
| | | | | GGGSGGGGSEIVLTQSPGTLSLSPGESATLSCRASQSVNKNYLAWYQQKPGQAPRLLIYGAS |
| | | | | SRATGIPDRFSGSGSGTDFTLTISRLEPEDFAVYYCQQYDRSPLTFGGGTRLEIKSGGGGSE |
| | | | | VQLVESGGGLVQPGGSLKLSCAASGFTFNKYAMNWVRQAPGKGLEWVARIRSKYNNYATYYA |
| | | | | DSVKDRFTISRDDSKNTAYLQMNNLKTEDTAVYYCVRHGNFGNSYISYWAYWGQGTLVTVSS |
| | | | | GGGGSGGGGSGGGGSQTVVTQEPSLTVSPGGTVTLTCGSSTGAVTSGNYPNWVQQKPGQAPR |
| | | | | GLIGGTKFLAPGTPARFSGSLLGGKAALTLSGVQPEDEAEYYCVLWYSNRWVFGGGTKLTVL |
| 91 | | DLL3-10 | VH CDR1 | SYYWS |
| 92 | | DLL3-10 | VH CDR2 | YIFYNGITNYNPSLKS |
| 93 | | DLL3-10 | VH CDR3 | IHSGSFSFDY |
| 94 | | DLL3-10 | VL CDR1 | RASQSVSRGYLA |
| 95 | | DLL3-10 | VL CDR2 | GASSRAT |
| 96 | | DLL3-10 | VL CDR3 | QQYDTSPIT |
| 97 | | DLL3-10 | VH | QVQLQESGPGLVKPSQTLSLTCTVSGGSISSYYWSWIRQPPGKGLEWIGYIFYNGITNYNPS |
| | | | | LKSRVTISLDTSKNQFSLKLSSVTAADTAKYYCARIHSGSFSFDYWDQGTLVTVSS |
| 98 | | DLL3-10 | VL | EIVMTQSPGTLSLSPGERATLSCRASQSVSRGYLAWYQQKPGQAPRLLIYGASSRATDIPDR |
| | | | | FSGSGSGTDFTLTISRLEPEDFAVYYCQQYDTSPITFGQGTKVEIK |
| 99 | EGF-3 | DLL3-10 | scFv | QVQLQESGPGLVKPSQTLSLTCTVSGGSISSYYWSWIRQPPGKGLEWIGYIFYNGITNYNPS |
| | | | | LKSRVTISLDTSKNQFSLKLSSVTAADTAKYYCARIHSGSFSFDYWDQGTLVTVSSGGGGSG |
| | | | | GGGSGGGGSEIVMTQSPGTLSLSPGERATLSCRASQSVSRGYLAWYQQKPGQAPRLLIYGAS |
| | | | | SRATDIPDRFSGSGSGTDFTLTISRLEPEDFAVYYCQQYDTSPITFGQGTKVEIK |
| 100 | | DLL3-10 | bispecific | QVQLQESGPGLVKPSQTLSLTCTVSGGSISSYYWSWIRQPPGKGLEWIGYIFYNGITNYNPS |
| | | xI2C | molecule | LKSRVTISLDTSKNQFSLKLSSVTAADTAKYYCARIHSGSFSFDYWDQGTLVTVSSGGGGSG |
| | | | | GGGSGGGGSEIVMTQSPGTLSLSPGERATLSCRASQSVSRGYLAWYQQKPGQAPRLLIYGAS |
| | | | | SRATDIPDRFSGSGSGTDFTLTISRLEPEDFAVYYCQQYDTSPITFGQGTKVEIKSGGGGSE |
| | | | | VQLVESGGGLVQPGGSLKLSCAASGFTFNKYAMNWVRQAPGKGLEWVARIRSKYNNYATYYA |
| | | | | DSVKDRFTISRDDSKNTAYLQMNNLKTEDTAVYYCVRHGNFGNSYISYWAYWGQGTLVTVSS |
| | | | | GGGGSGGGGSGGGGSQTVVTQEPSLTVSPGGTVTLTCGSSTGAVTSGNYPNWVQQKPGQAPR |
| | | | | GLIGGTKFLAPGTPARFSGSLLGGKAALTLSGVQPEDEAEYYCVLWYSNRWVFGGGTKLTVL |
| 101 | | DLL3-11 | VH CDR1 | NAGMS |
| 102 | | DLL3-11 | VH CDR2 | RIKNKIDGGTTDFAAPVKG |
| 103 | | DLL3-11 | VH CDR3 | RGWYGDYFDY |
| 104 | | DLL3-11 | VL CDR1 | RSSQSLLHSNGYNYLD |
| 105 | | DLL3-11 | VL CDR2 | LGSNRAS |
| 106 | | DLL3-11 | VL CDR3 | MQALQTPFT |
| 107 | | DLL3-11 | VH | EVQLVESGGGLVKPGGSLRLSCAASGFIFNNAGMSWVRQAPGKGLEWVGRIKNKIDGGTTDF |
| | | | | AAPVKGRFTISRDDSKNTLYLQMNSLKAEDTAVYYCTARGWYGDYFDYWGQGTLVTVSS |
| 108 | | DLL3-11 | VL | DIVMTQTPLSLPVTPGEPASISCRSSQSLLHSNGYNYLDWYLQKPGQSPQLLIYLGSNRASG |
| | | | | VPDRFSGSGSGTDFTLKISRVEAEDVGIYYCMQALQTPFTFGPGTKVEIK |
| 109 | EGF-3 | DLL3-11 | scFv | EVQLVESGGGLVKPGGSLRLSCAASGFIFNNAGMSWVRQAPGKGLEWVGRIKNKIDGGTTDF |
| | | | | AAPVKGRFTISRDDSKNTLYLQMNSLKAEDTAVYYCTARGWYGDYFDYWGQGTLVTVSSGGG |
| | | | | GSGGGGSGGGGSDIVMTQTPLSLPVTPGEPASISCRSSQSLLHSNGYNYLDWYLQKPGQSPQ |
| | | | | LLIYLGSNRASGVPDRFSGSGSGTDFTLKISRVEAEDVGIYYCMQALQTPFTFGPGTKVEIK |
| 110 | | DLL3-11 | bispecific | EVQLVESGGGLVKPGGSLRLSCAASGFIFNNAGMSWVRQAPGKGLEWVGRIKNKIDGGTTDF |
| | | xI2C | molecule | AAPVKGRFTISRDDSKNTLYLQMNSLKAEDTAVYYCTARGWYGDYFDYWGQGTLVTVSSGGG |
| | | | | GSGGGGSGGGGSDIVMTQTPLSLPVTPGEPASISCRSSQSLLHSNGYNYLDWYLQKPGQSPQ |
| | | | | LLIYLGSNRASGVPDRFSGSGSGTDFTLKISRVEAEDVGIYYCMQALQTPFTFGPGTKVEIK |
| | | | | SGGGGSEVQLVESGGGLVQPGGSLKLSCAASGFTFNKYAMNWVRQAPGKGLEWVARIRSKYN |
| | | | | NYATYYADSVKDRFTISRDDSKNTAYLQMNNLKTEDTAVYYCVRHGNFGNSYISYWAYWGQG |
| | | | | TLVTVSSGGGGSGGGGSGGGGSQTVVTQEPSLTVSPGGTVTLTCGSSTGAVTSGNYPNWVQQ |
| | | | | KPGQAPRGLIGGTKFLAPGTPARFSGSLLGGKAALTLSGVQPEDEAEYYCVLWYSNRWVFGG |
| | | | | GTKLTVL |
| 111 | | DLL3-12 | VH CDR1 | SYDIH |
| 112 | | DLL3-12 | VH CDR2 | VISSHGSNKNYARSVKG |
| 113 | | DLL3-12 | VH CDR3 | DGYSGNDPFYYYYHGMDV |
| 114 | | DLL3-12 | VL CDR1 | RASQSISSYLN |
| 115 | | DLL3-12 | VL CDR2 | AASSLQS |
| 116 | | DLL3-12 | VL CDR3 | QQSFTTPLT |
| 117 | | DLL3-12 | VH | QVQLVESGGGVVQPGRSLRLSCAASGFSFSSYDIHWVRQAPGKGLEWVAVISSHGSNKNYAR |
| | | | | SVKGRFTISRDNSKNTLYLQMNSLKAEDTAVYYCARDGYSGNDPFYYYYHGMDVWGQGTTVT |
| | | | | VSS |
| 118 | | DLL3-12 | VL | DIQMTQSPSSLSASVGDRVTITCRASQSISSYLNWYQQKPGKAPKLLIYAASSLQSGVPSRF |
| | | | | SGSGSGTDFSLTISSLQPEDFATYYCQQSFTTPLTFGGGTKVEIK |
| 119 | EGF-3/[4] | DLL3-12 | scFv | QVQLVESGGGVVQPGRSLRLSCAASGFSFSSYDIHWVRQAPGKGLEWVAVISSHGSNKNYAR |
| | | | | SVKGRFTISRDNSKNTLYLQMNSLKAEDTAVYYCARDGYSGNDPFYYYYHGMDVWGQGTTVT |
| | | | | VSSGGGGSGGGGSGGGGSDIQMTQSPSSLSASVGDRVTITCRASQSISSYLNWYQQKPGKAP |
| | | | | KLLIYAASSLQSGVPSRFSGSGSGTDFSLTISSLQPEDFATYYCQQSFTTPLTFGGGTKVEI |
| | | | | K |
| 120 | | DLL3-12 | bispecific | QVQLVESGGGVVQPGRSLRLSCAASGFSFSSYDIHWVRQAPGKGLEWVAVISSHGSNKNYAR |
| | | xI2C | molecule | SVKGRFTISRDNSKNTLYLQMNSLKAEDTAVYYCARDGYSGNDPFYYYYHGMDVWGQGTTVT |
| | | | | VSSGGGGSGGGGSGGGGSDIQMTQSPSSLSASVGDRVTITCRASQSISSYLNWYQQKPGKAP |
| | | | | KLLIYAASSLQSGVPSRFSGSGSGTDFSLTISSLQPEDFATYYCQQSFTTPLTFGGGTKVEI |
| | | | | KSGGGGSEVQLVESGGGLVQPGGSLKLSCAASGFTFNKYAMNWVRQAPGKGLEWVARIRSKY |
| | | | | NNYATYYADSVKDRFTISRDDSKNTAYLQMNNLKTEDTAVYYCVRHGNFGNSYISYWAYWGQ |
| | | | | GTLVTVSSGGGGSGGGGSGGGGSQTVVTQEPSLTVSPGGTVTLTCGSSTGAVTSGNYPNWVQ |
| | | | | QKPGQAPRGLIGGTKFLAPGTPARFSGSLLGGKAALTLSGVQPEDEAEYYCVLWYSNRWVFG |
| | | | | GGTKLTVL |
| 121 | | DLL3-13 | VH CDR1 | SYYMH |
| 122 | | DLL3-13 | VH CDR2 | IINPSDGSTNYAQNFQG |
| 123 | | DLL3-13 | VH CDR3 | GGNSAFYSYYDMDV |
| 124 | | DLL3-13 | VL CDR1 | RSSQSLVYRDGNTYLS |
| 125 | | DLL3-13 | VL CDR2 | KVSNWQS |
| 126 | | DLL3-13 | VL CDR3 | MQGTHWPPT |
| 127 | | DLL3-13 | VH | QVQLVQSGAEVKKPGASVKVSCKASGYTFTSYYMHWVRQAPGQGLEWMGIINPSDGSTNYAQ |
| | | | | NFQGRVTMTRDTSTNTVYMELSSLRSEDTAVYYCARGGNSAFYSYYDMDVWGQGTTVTVSS |
| 128 | | DLL3-13 | VL | DVVMTQSPLSLPVTLGQPASISCRSSQSLVYRDGNTYLSWFQQRPGQSPRRLIYKVSNWQSG |
| | | | | VPDRFSGSGSGTDFTLKISRVEAEDVGVYFCMQGTHWPPTFGQGTKVEIK |
| 129 | EGF-4 | DLL3-13 | scFv | QVQLVQSGAEVKKPGASVKVSCKASGYTFTSYYMHWVRQAPGQGLEWMGIINPSDGSTNYAQ |
| | | | | NFQGRVTMTRDTSTNTVYMELSSLRSEDTAVYYCARGGNSAFYSYYDMDVWGQGTTVTVSSG |
| | | | | GGGSGGGGSGGGGSDVVMTQSPLSLPVTLGQPASISCRSSQSLVYRDGNTYLSWFQQRPGQS |
| | | | | PRRLIYKVSNWQSGVPDRFSGSGSGTDFTLKISRVEAEDVGVYFCMQGTHWPPTFGQGTKVE |
| | | | | IK |
| 130 | | DLL3-13 | bispecific | QVQLVQSGAEVKKPGASVKVSCKASGYTFTSYYMHWVRQAPGQGLEWMGIINPSDGSTNYAQ |
| | | xI2C | molecule | NFQGRVTMTRDTSTNTVYMELSSLRSEDTAVYYCARGGNSAFYSYYDMDVWGQGTTVTVSSG |
| | | | | GGGSGGGGSGGGGSDVVMTQSPLSLPVTLGQPASISCRSSQSLVYRDGNTYLSWFQQRPGQS |
| | | | | PRRLIYKVSNWQSGVPDRFSGSGSGTDFTLKISRVEAEDVGVYFCMQGTHWPPTFGQGTKVE |
| | | | | IKSGGGGSEVQLVESGGGLVQPGGSLKLSCAASGFTFNKYAMNWVRQAPGKGLEWVARIRSK |
| | | | | YNNYATYYADSVKDRFTISRDDSKNTAYLQMNNLKTEDTAVYYCVRHGNFGNSYISYWAYWG |
| | | | | QGTLVTVSSGGGGSGGGGSGGGGSQTVVTQEPSLTVSPGGTVTLTCGSSTGAVTSGNYPNWV |
| | | | | QQKPGQAPRGLIGGTKFLAPGTPARFSGSLLGGKAALTLSGVQPEDEAEYYCVLWYSNRWVF |
| | | | | GGGTKLTVL |
| 131 | | DLL3-14 | VH CDR1 | NYYMH |
| 132 | | DLL3-14 | VH CDR2 | IINPSDGSTSYAQKFQG |
| 133 | | DLL3-14 | VH CDR3 | GGNSAFYSYYDMDV |
| 134 | | DLL3-14 | VL CDR1 | RSSQSLVYRDGNTYLS |
| 135 | | DLL3-14 | VL CDR2 | KVSNWQS |
| 136 | | DLL3-14 | VL CDR3 | MQGTHWPPT |
| 137 | | DLL3-14 | VH | QVQLVQSGAEVKKPGASVKVSCKASGYTFTNYYMHWVRQAPGLGLEWMGIINPSDGSTSYAQ |
| | | | | KFQGRVTMTRDTSTNTVYMDLSSLRSEDTAVYYCARGGNSAFYSYYDMDVWGQGTTVTVSS |
| 138 | | DLL-14 | VL | DVVMTQTPLSLPVTLGQPASISCRSSQSLVYRDGNTYLSWFQQRPGQSPRRLIYKVSNWQSG |
| | | | | VPDRFSGGGSGTDFTLKISRVEAEDVGVYYCMQGTHWPPTFGQGTKVEIK |
| 139 | EGF-4 | DLL3-14 | scFv | QVQLVQSGAEVKKPGASVKVSCKASGYTFTNYYMHWVRQAPGLGLEWMGIINPSDGSTSYAQ |
| | | | | KFQGRVTMTRDTSTNTVYMDLSSLRSEDTAVYYCARGGNSAFYSYYDMDVWGQGTTVTVSSG |
| | | | | GGGSGGGGSGGGGSDVVMTQTPLSLPVTLGQPASISCRSSQSLVYRDGNTYLSWFQQRPGQS |
| | | | | PRRLIYKVSNWQSGVPDRFSGGGSGTDFTLKISRVEAEDVGVYYCMQGTHWPPTFGQGTKVE |
| | | | | IK |
| 140 | | DLL3-14 | bispecific | QVQLVQSGAEVKKPGASVKVSCKASGYTFTNYYMHWVRQAPGLGLEWMGIINPSDGSTSYAQ |
| | | xI2C | molecule | KFQGRVTMTRDTSTNTVYMDLSSLRSEDTAVYYCARGGNSAFYSYYDMDVWGQGTTVTVSSG |
| | | | | GGGSGGGGSGGGGSDVVMTQTPLSLPVTLGQPASISCRSSQSLVYRDGNTYLSWFQQRPGQS |
| | | | | PRRLIYKVSNWQSGVPDRFSGGGSGTDFTLKISRVEAEDVGVYYCMQGTHWPPTFGQGTKVE |
| | | | | IKSGGGGSEVQLVESGGGLVQPGGSLKLSCAASGFTFNKYAMNWVRQAPGKGLEWVARIRSK |
| | | | | YNNYATYYADSVKDRFTISRDDSKNTAYLQMNNLKTEDTAVYYCVRHGNFGNSYISYWAYWG |
| | | | | QGTLVTVSSGGGGSGGGGSGGGGSQTVVTQEPSLTVSPGGTVTLTCGSSTGAVTSGNYPNWV |
| | | | | QQKPGQAPRGLIGGTKFLAPGTPARFSGSLLGGKAALTLSGVQPEDEAEYYCVLWYSNRWVF |
| | | | | GGGTKLTVL |
| 141 | | DLL3-15 | VH CDR1 | GYYIH |
| 142 | | DLL3-15 | VH CDR2 | IINPSDGSTSYGQNFQG |
| 143 | | DLL3-15 | VH CDR3 | GGNSAFYSYYDMDV |
| 144 | | DLL3-15 | VL CDR1 | RSSQSLAYRDGNTYLS |
| 145 | | DLL3-15 | VL CDR2 | KVSNWQS |
| 146 | | DLL3-15 | VL CDR3 | MQGTHWPPT |
| 147 | | DLL3-15 | VH | QVQLVQSGAEVKKPGASVKVSCKASGYTFTGYYIHWVRQAPGQGLEWMGIINPSDGSTSYGQ |
| | | | | NFQGRVTMTRDTSTNTVYMELSSLRSEDTAVYYCARGGNSAFYSYYDMDVWGQGTTVTVSS |
| 148 | | DLL3-15 | VL | DVVMTQSPLSLPVTLGQPASISCRSSQSLAYRDGNTYLSWFQQRPGQSPRRLIYKVSNWQSG |
| | | | | VPDRFSGSGSGTDFTLKISRVEAEDVGVYFCMQGTHWPPTFGQGTKVEIK |
| 149 | EGF-4 | DLL3-15 | scFv | QVQLVQSGAEVKKPGASVKVSCKASGYTFTGYYIHWVRQAPGQGLEWMGIINPSDGSTSYGQ |
| | | | | NFQGRVTMTRDTSTNTVYMELSSLRSEDTAVYYCARGGNSAFYSYYDMDVWGQGTTVTVSSG |
| | | | | GGGSGGGGSGGGGSDVVMTQSPLSLPVTLGQPASISCRSSQSLAYRDGNTYLSWFQQRPGQS |
| | | | | PRRLIYKVSNWQSGVPDRFSGSGSGTDFTLKISRVEAEDVGVYFCMQGTHWPPTFGQGTKVE |
| | | | | IK |
| 150 | | DLL3-15 | bispecific | QVQLVQSGAEVKKPGASVKVSCKASGYTFTGYYIHWVRQAPGQGLEWMGIINPSDGSTSYGQ |
| | | xI2C | molecule | NFQGRVTMTRDTSTNTVYMELSSLRSEDTAVYYCARGGNSAFYSYYDMDVWGQGTTVTVSSG |
| | | | | GGGSGGGGSGGGGSDVVMTQSPLSLPVTLGQPASISCRSSQSLAYRDGNTYLSWFQQRPGQS |
| | | | | PRRLIYKVSNWQSGVPDRFSGSGSGTDFTLKISRVEAEDVGVYFCMQGTHWPPTFGQGTKVE |
| | | | | IKSGGGGSEVQLVESGGGLVQPGGSLKLSCAASGFTFNKYAMNWVRQAPGKGLEWVARIRSK |
| | | | | YNNYATYYADSVKDRFTISRDDSKNTAYLQMNNLKTEDTAVYYCVRHGNFGNSYISYWAYWG |
| | | | | QGTLVTVSSGGGGSGGGGSGGGGSQTVVTQEPSLTVSPGGTVTLTCGSSTGAVTSGNYPNWV |
| | | | | QQKPGQAPRGLIGGTKFLAPGTPARFSGSLLGGKAALTLSGVQPEDEAEYYCVLWYSNRWVF |
| | | | | GGGTKLTVL |
| 151 | | DLL3-16 | VH CDR1 | GHYMH |
| 152 | | DLL3-16 | VH CDR2 | IINPSDGSTNYAQKFQG |
| 153 | | DLL3-16 | VH CDR3 | GTTVVHYSYYDMDV |
| 154 | | DLL3-16 | VL CDR1 | RSSQSLVYRDGNTYLT |
| 155 | | DLL3-16 | VL CDR2 | KVSNWQS |
| 156 | | DLL3-16 | VL CDR3 | MQGTHWPPT |
| 157 | | DLL3-16 | VH | QVQLVQSGAEVKKPGASVKVSCKASGYTFTGHYMHWVRQAPGQGLEWMGIINPSDGSTNYAQ |
| | | | | KFQGRVTMTRDTSTSTVYMELRSLRSEDTAVYYCTRGTTVVHYSYYDMDVWGQGTTVTVSS |
| 158 | | DLL3-16 | VL | DVVMTQTPLSLPVTLGQPASISCRSSQSLVYRDGNTYLTWFQQRPGQSPRRLIYKVSNWQSG |
| | | | | VPDRFSGSGSGTDFTLKISRVEAEDVGVYYCMQGTHWPPTFGGGTKVEIK |
| 159 | EGF-4 | DLL3-16 | scFv | QVQLVQSGAEVKKPGASVKVSCKASGYTFTGHYMHWVRQAPGQGLEWMGIINPSDGSTNYAQ |
| | | | | KFQGRVTMTRDTSTSTVYMELRSLRSEDTAVYYCTRGTTVVHYSYYDMDVWGQGTTVTVSSG |
| | | | | GGGSGGGGSGGGGSDVVMTQTPLSLPVTLGQPASISCRSSQSLVYRDGNTYLTWFQQRPGQS |
| | | | | PRRLIYKVSNWQSGVPDRFSGSGSGTDFTLKISRVEAEDVGVYYCMQGTHWPPTFGGGTKVE |
| | | | | IK |
| 160 | | DLL3-16 | bispecific | QVQLVQSGAEVKKPGASVKVSCKASGYTFTGHYMHWVRQAPGQGLEWMGIINPSDGSTNYAQ |
| | | xI2C | molecule | KFQGRVTMTRDTSTSTVYMELRSLRSEDTAVYYCTRGTTVVHYSYYDMDVWGQGTTVTVSSG |
| | | | | GGGSGGGGSGGGGSDVVMTQTPLSLPVTLGQPASISCRSSQSLVYRDGNTYLTWFQQRPGQS |
| | | | | PRRLIYKVSNWQSGVPDRFSGSGSGTDFTLKISRVEAEDVGVYYCMQGTHWPPTFGGGTKVE |
| | | | | IKSGGGGSEVQLVESGGGLVQPGGSLKLSCAASGFTFNKYAMNWVRQAPGKGLEWVARIRSK |
| | | | | YNNYATYYADSVKDRFTISRDDSKNTAYLQMNNLKTEDTAVYYCVRHGNFGNSYISYWAYWG |
| | | | | QGTLVTVSSGGGGSGGGGSGGGGSQTVVTQEPSLTVSPGGTVTLTCGSSTGAVTSGNYPNWV |
| | | | | QQKPGQAPRGLIGGTKFLAPGTPARFSGSLLGGKAALTLSGVQPEDEAEYYCVLWYSNRWVF |
| | | | | GGGTKLTVL |
| 161 | | DLL3-17 | VH CDR1 | NYFMH |
| 162 | | DLL3-17 | VH CDR2 | IINPSDGSTSYAQNFQG |
| 163 | | DLL3-17 | VH CDR3 | GGNSAFYSYYDMDV |
| 164 | | DLL3-17 | VL CDR1 | RSSQSLVYRDGNTYLS |
| 165 | | DLL3-17 | VL CDR2 | RVSNWQS |
| 166 | | DLL3-17 | VL CDR3 | MQGTYWPPT |
| 167 | | DLL3-17 | VH | QVQLVQSGAEVKKPGASVKVSCKASGYTFTNYFMHWVRQAPGLGLEWMGIINPSDGSTSYAQ |
| | | | | NFQGRVTMTRDTSTNTVYMELSSLRSEDTAVYYCARGGNSAFYSYYDMDVWGQGTTVTVSS |
| 168 | | DLL3-17 | VL | DVVMTQSPLSLPVTLGQPASISCRSSQSLVYRDGNTYLSWFQQRPGQSPRRLIYRVSNWQSG |
| | | | | VPDRFSGSGSGTDFTLKISRVEAEDVGVYFCMQGTYWPPTFGQGTKVDIK |
| 169 | EGF-4 | DLL3-17 | scFv | QVQLVQSGAEVKKPGASVKVSCKASGYTFTNYFMHWVRQAPGLGLEWMGIINPSDGSTSYAQ |
| | | | | NFQGRVTMTRDTSTNTVYMELSSLRSEDTAVYYCARGGNSAFYSYYDMDVWGQGTTVTVSSG |
| | | | | GGGSGGGGSGGGGSDVVMTQSPLSLPVTLGQPASISCRSSQSLVYRDGNTYLSWFQQRPGQS |
| | | | | PRRLIYRVSNWQSGVPDRFSGSGSGTDFTLKISRVEAEDVGVYFCMQGTYWPPTFGQGTKVD |
| | | | | IK |
| 170 | | DLL3-17 | bispecific | QVQLVQSGAEVKKPGASVKVSCKASGYTFTNYFMHWVRQAPGLGLEWMGIINPSDGSTSYAQ |
| | | xI2C | molecule | NFQGRVTMTRDTSTNTVYMELSSLRSEDTAVYYCARGGNSAFYSYYDMDVWGQGTTVTVSSG |
| | | | | GGGSGGGGSGGGGSDVVMTQSPLSLPVTLGQPASISCRSSQSLVYRDGNTYLSWFQQRPGQS |
| | | | | PRRLIYRVSNWQSGVPDRFSGSGSGTDFTLKISRVEAEDVGVYFCMQGTYWPPTFGQGTKVD |
| | | | | IKSGGGGSEVQLVESGGGLVQPGGSLKLSCAASGFTFNKYAMNWVRQAPGKGLEWVARIRSK |
| | | | | YNNYATYYADSVKDRFTISRDDSKNTAYLQMNNLKTEDTAVYYCVRHGNFGNSYISYWAYWG |
| | | | | QGTLVTVSSGGGGSGGGGSGGGGSQTVVTQEPSLTVSPGGTVTLTCGSSTGAVTSGNYPNWV |
| | | | | QQKPGQAPRGLIGGTKFLAPGTPARFSGSLLGGKAALTLSGVQPEDEAEYYCVLWYSNRWVF |
| | | | | GGGTKLTVL |
| 171 | | DLL3-18 | VH CDR1 | NYGMH |
| 172 | | DLL3-18 | VH CDR2 | VISHHGSSKYYARSVKG |
| 173 | | DLL3-18 | VH CDR3 | DWWELVFDY |
| 174 | | DLL3-18 | VL CDR1 | KSSQSLLHSDGKTFLY |
| 175 | | DLL3-18 | VL CDR2 | EVSNRFS |
| 176 | | DLL3-18 | VL CDR3 | LQGIHLPFT |
| 177 | | DLL3-18 | VH | QVQLVESGGGAVQPGRSLRLSCAASGFTFSNYGMHWVRQAPGKGLEWVAVISHHGSSKYYAR |
| | | | | SVKGRFTISRDNSKNTLYLEMNSLRAEDTAVYYCARDWWELVFDYWGQGTLVTVSS |
| 178 | | DLL3-18 | VL | DIVMTQTPLSLSVTPGQPASISCKSSQSLLHSDGKTFLYWYLQKPGQPPQLLIYEVSNRFSG |
| | | | | VPDRFSGSGSGTDFTLKISRVEAEDVGVYYCLQGIHLPFTFGPGTKVEIK |
| 179 | EGF-5/[6] | DLL3-18 | scFv | QVQLVESGGGAVQPGRSLRLSCAASGFTFSNYGMHWVRQAPGKGLEWVAVISHHGSSKYYAR |
| | | | | SVKGRFTISRDNSKNTLYLEMNSLRAEDTAVYYCARDWWELVFDYWGQGTLVTVSSGGGGSG |
| | | | | GGGSGGGGSDIVMTQTPLSLSVTPGQPASISCKSSQSLLHSDGKTFLYWYLQKPGQPPQLLI |
| | | | | YEVSNRFSGVPDRFSGSGSGTDFTLKISRVEAEDVGVYYCLQGIHLPFTFGPGTKVEIK |
| 180 | | DLL3-18 | bispecific | QVQLVESGGGAVQPGRSLRLSCAASGFTFSNYGMHWVRQAPGKGLEWVAVISHHGSSKYYAR |
| | | xI2C | molecule | SVKGRFTISRDNSKNTLYLEMNSLRAEDTAVYYCARDWWELVFDYWGQGTLVTVSSGGGGSG |
| | | | | GGGSGGGGSDIVMTQTPLSLSVTPGQPASISCKSSQSLLHSDGKTFLYWYLQKPGQPPQLLI |
| | | | | YEVSNRFSGVPDRFSGSGSGTDFTLKISRVEAEDVGVYYCLQGIHLPFTFGPGTKVEIKSGG |
| | | | | GGSEVQLVESGGGLVQPGGSLKLSCAASGFTFNKYAMNWVRQAPGKGLEWVARIRSKYNNYA |
| | | | | TYYADSVKDRFTISRDDSKNTAYLQMNNLKTEDTAVYYCVRHGNFGNSYISYWAYWGQGTLV |
| | | | | TVSSGGGGSGGGGSGGGGSQTVVTQEPSLTVSPGGTVTLTCGSSTGAVTSGNYPNWVQQKPG |
| | | | | QAPRGLIGGTKFLAPGTPARFSGSLLGGKAALTLSGVQPEDEAEYYCVLWYSNRWVFGGGTK |
| | | | | LTVL |
| 181 | | DLL3-19 | VH CDR1 | NSRMGVS |
| 182 | | DLL3-19 | VH CDR2 | HIFSNDGKSYSTSLKS |
| 183 | | DLL3-19 | VH CDR3 | YNYDSSGYYYSFFDY |
| 184 | | DLL3-19 | VL CDR1 | RASQSISSYLN |
| 185 | | DLL3-19 | VL CDR2 | AASSLQS |
| 186 | | DLL3-19 | VL CDR3 | QQGYSSPFT |
| 187 | | DLL3-19 | VH | QVTLKESGPMLVKPTETLTLTCTVSGFSLSNSRMGVSWIRQPPGRALEWLAHIFSNDGKSYS |
| | | | | TSLKSRLTISKDTSKSQVVLTMTNMDPVDTATYYCARYNYDSSGYYYSFFDYWGQGTLVTVS |
| | | | | S |
| 188 | | DLL3-19 | VL | DIQMTQSPSSLSASVGDRVTITCRASQSISSYLNWYQQKPGKAPKLLIYAASSLQSGVPSRF |
| | | | | SGSGSGTDFTLTISSLQPEDFATYYCQQGYSSPFTFGGGTKVEIK |
| 189 | EGF-5/[6] | DLL3-19 | scFv | QVTLKESGPMLVKPTETLTLTCTVSGFSLSNSRMGVSWIRQPPGRALEWLAHIFSNDGKSYS |
| | | | | TSLKSRLTISKDTSKSQVVLTMTNMDPVDTATYYCARYNYDSSGYYYSFFDYWGQGTLVTVS |
| | | | | SGGGGSGGGGSGGGGSDIQMTQSPSSLSASVGDRVTITCRASQSISSYLNWYQQKPGKAPKL |
| | | | | LIYAASSLQSGVPSRFSGSGSGTDFTLTISSLQPEDFATYYCQQGYSSPFTFGGGTKVEIK |
| 190 | | DLL3-19 | bispecific | QVTLKESGPMLVKPTETLTLTCTVSGFSLSNSRMGVSWIRQPPGRALEWLAHIFSNDGKSYS |
| | | xI2C | molecule | TSLKSRLTISKDTSKSQVVLTMTNMDPVDTATYYCARYNYDSSGYYYSFFDYWGQGTLVTVS |
| | | | | SGGGGSGGGGSGGGGSDIQMTQSPSSLSASVGDRVTITCRASQSISSYLNWYQQKPGKAPKL |
| | | | | LIYAASSLQSGVPSRFSGSGSGTDFTLTISSLQPEDFATYYCQQGYSSPFTFGGGTKVEIKS |
| | | | | GGGGSEVQLVESGGGLVQPGGSLKLSCAASGFTFNKYAMNWVRQAPGKGLEWVARIRSKYNN |
| | | | | YATYYADSVKDRFTISRDDSKNTAYLQMNNLKTEDTAVYYCVRHGNFGNSYISYWAYWGQGT |
| | | | | LVTVSSGGGGSGGGGSGGGGSQTVVTQEPSLTVSPGGTVTLTCGSSTGAVTSGNYPNWVQQK |
| | | | | PGQAPRGLIGGTKFLAPGTPARFSGSLLGGKAALTLSGVQPEDEAEYYCVLWYSNRWVFGGG |
| | | | | TKLTVL |
| 191 | | DLL3-20 | VH CDR1 | NARMGVS |
| 192 | | DLL3-20 | VH CDR2 | HIFSTDEKSYSTSLKS |
| 193 | | DLL3-20 | VH CDR3 | YYYDSSGYYYSFFDY |
| 194 | | DLL3-20 | VL CDR1 | RASQSIRSYLN |
| 195 | | DLL3-20 | VL CDR2 | GASNLQS |
| 196 | | DLL3-20 | VL CDR3 | QQSYSSPFT |
| 197 | | DLL3-20 | VH | QVTLKESGPVLVKPTETLTLTCTVSGFSLSNARMGVSWLRQPPGKALEWLAHIFSTDEKSYS |
| | | | | TSLKSRLTISKDTSKSQVVLTMTNMDPVDTATYYCARYYYDSSGYYYSFFDYWGQGTLVTVS |
| | | | | S |
| 198 | | DLL3-20 | VL | DIQMTQSPSSLSASVGDRVTITCRASQSIRSYLNWYQQKPGKAPKLLIYGASNLQSGVPSRF |
| | | | | SGSGSGTDFTLTISSLQPEDFATYYCQQSYSSPFTFGGGTKVEIK |
| 199 | EGF-5/[6] | DLL3-20 | scFv | QVTLKESGPVLVKPTETLTLTCTVSGFSLSNARMGVSWLRQPPGKALEWLAHIFSTDEKSYS |
| | | | | TSLKSRLTISKDTSKSQVVLTMTNMDPVDTATYYCARYYYDSSGYYYSFFDYWGQGTLVTVS |
| | | | | SGGGGSGGGGSGGGGSDIQMTQSPSSLSASVGDRVTITCRASQSIRSYLNWYQQKPGKAPKL |
| | | | | LIYGASNLQSGVPSRFSGSGSGTDFTLTISSLQPEDFATYYCQQSYSSPFTFGGGTKVEIK |
| 200 | | DLL3-20 | bispecific | QVTLKESGPVLVKPTETLTLTCTVSGFSLSNARMGVSWLRQPPGKALEWLAHIFSTDEKSYS |
| | | xI2C | molecule | TSLKSRLTISKDTSKSQVVLTMTNMDPVDTATYYCARYYYDSSGYYYSFFDYWGQGTLVTVS |
| | | | | SGGGGSGGGGSGGGGSDIQMTQSPSSLSASVGDRVTITCRASQSIRSYLNWYQQKPGKAPKL |
| | | | | LIYGASNLQSGVPSRFSGSGSGTDFTLTISSLQPEDFATYYCQQSYSSPFTFGGGTKVEIKS |
| | | | | GGGGSEVQLVESGGGLVQPGGSLKLSCAASGFTFNKYAMNWVRQAPGKGLEWVARIRSKYNN |
| | | | | YATYYADSVKDRFTISRDDSKNTAYLQMNNLKTEDTAVYYCVRHGNFGNSYISYWAYWGQGT |
| | | | | LVTVSSGGGGSGGGGSGGGGSQTVVTQEPSLTVSPGGTVTLTCGSSTGAVTSGNYPNWVQQK |
| | | | | PGQAPRGLIGGTKFLAPGTPARFSGSLLGGKAALTLSGVQPEDEAEYYCVLWYSNRWVFGGG |
| | | | | TKLTVL |
| 201 | | DLL3-21 | VH CDR1 | SYYIH |
| 202 | | DLL3-21 | VH CDR2 | IINPSGGSKSYAQKFRG |
| 203 | | DLL3-21 | VH CDR3 | SMSTVTSDAFDI |
| 204 | | DLL3-21 | VL CDR1 | RASQSISNYLN |
| 205 | | DLL3-21 | VL CDR2 | AASSLQS |
| 206 | | DLL3-21 | VL CDR3 | QQSYSAPLT |
| 207 | | DLL3-21 | VH | QVQLVQSGAEVKKPGASVKVSCKASGYAFTSYYIHWVRQAPGQGLEWMGIINPSGGSKSYAQ |
| | | | | KFRGRVTMTRDTSTSTVYMELSSLTSEDTAVYYCARSMSTVTSDAFDIWGQGTMVTVSS |
| 208 | | DLL3-21 | VL | DIQMTQSPSSLSASVGDRVTITCRASQSISNYLNWYQQKPGKAPKLLIYAASSLQSGVPSRF |
| | | | | SGSGSGTEFTLTISSLQPEDFATYYCQQSYSAPLTFGGGTKVDIK |
| 209 | EGF-5/[6] | DLL3-21 | scFv | QVQLVQSGAEVKKPGASVKVSCKASGYAFTSYYIHWVRQAPGQGLEWMGIINPSGGSKSYAQ |
| | | | | KFRGRVTMTRDTSTSTVYMELSSLTSEDTAVYYCARSMSTVTSDAFDIWGQGTMVTVSSGGG |
| | | | | GSGGGGSGGGGSDIQMTQSPSSLSASVGDRVTITCRASQSISNYLNWYQQKPGKAPKLLIYA |
| | | | | ASSLQSGVPSRFSGSGSGTEFTLTISSLQPEDFATYYCQQSYSAPLTFGGGTKVDIK |
| 210 | | DLL3-21 | bispecific | QVQLVQSGAEVKKPGASVKVSCKASGYAFTSYYIHWVRQAPGQGLEWMGIINPSGGSKSYAQ |
| | | xI2C | molecule | KFRGRVTMTRDTSTSTVYMELSSLTSEDTAVYYCARSMSTVTSDAFDIWGQGTMVTVSSGGG |
| | | | | GSGGGGSGGGGSDIQMTQSPSSLSASVGDRVTITCRASQSISNYLNWYQQKPGKAPKLLIYA |
| | | | | ASSLQSGVPSRFSGSGSGTEFTLTISSLQPEDFATYYCQQSYSAPLTFGGGTKVDIKSGGGG |
| | | | | SEVQLVESGGGLVQPGGSLKLSCAASGFTFNKYAMNWVRQAPGKGLEWVARIRSKYNNYATY |
| | | | | YADSVKDRFTISRDDSKNTAYLQMNNLKTEDTAVYYCVRHGNFGNSYISYWAYWGQGTLVTV |
| | | | | SSGGGGSGGGGSGGGGSQTVVTQEPSLTVSPGGTVTLTCGSSTGAVTSGNYPNWVQQKPGQA |
| | | | | PRGLIGGTKFLAPGTPARFSGSLLGGKAALTLSGVQPEDEAEYYCVLWYSNRWVFGGGTKLT |
| | | | | VL |
| 211 | EGF-3 | DLL3-4 | bispecific | QVQLQESGPGLVKPSETLSLTCTVSGGSISSYYWSWIRQPPGKGLEWIGYVYYSGTTNYNPS |
| | | xF12Q | molecule | LKSRVTISVDTSKNQFSLKLSSVTAADTAVYYCASIAVTGFYFDYWGQGTLVTVSSGGGGSG |
| | | | | GGGSGGGGSEIVLTQSPGTLSLSPGERVTLSCRASQRVNNNYLAWYQQRPGQAPRLLIYGAS |
| | | | | SRATGIPDRFSGSGSGTDFTLTISRLEPEDFAVYYCQQYDRSPLTFGGGTKLEIKSGGGGSE |
| | | | | VQLVESGGGLVQPGGSLRLSCAASGFTFNSYAMNWVRQAPGKGLEWVARIRSKYNNYATYYA |
| | | | | DSVKGRFTISRDDSKNTAYLQMNSLKTEDTAVYYCVRHGNFGNSYVSWWAYWGQGTLVTVSS |
| | | | | GGGGSGGGGSGGGGSQTVVTQEPSLTVSPGGTVTLTCGSSTGAVTSGNYPNWVQQKPGQAPR |
| | | | | GLIGGTKFLAPGTPARFSGSLLGGKAALTLSGVQPEDEAEYYCVLWYSNRWVFGGGTKLTVL |
| 212 | EGF-3 | DLL3-5 | bispecific | QVQLQESGPGLVKPSETLSLTCTVSGGSISSYYWSWIRQPPGKGLEWIGYIYYSGRTNYYPS |
| | | xF12Q | molecule | LKSRVTISIDTSKNQFSLKLSSVTAADTAVYYCARIAVAGFFFDYWGQGTLVTVSSGGGGSG |
| | | | | GGGSGGGGSEIVLTQSPGTLSLSPGERATLSCRASQSVNKNYLAWYQQKPGQAPRLLIYGAS |
| | | | | SRATGIPDRFSGSGSGTDFTLTISRLEPEDFAVYYCQQYDRSPLTFGGGTKLEIKSGGGGSE |
| | | | | VQLVESGGGLVQPGGSLRLSCAASGFTFNSYAMNWVRQAPGKGLEWVARIRSKYNNYATYYA |
| | | | | DSVKGRFTISRDDSKNTAYLQMNSLKTEDTAVYYCVRHGNFGNSYVSWWAYWGQGTLVTVSS |
| | | | | GGGGSGGGGSGGGGSQTVVTQEPSLTVSPGGTVTLTCGSSTGAVTSGNYPNWVQQKPGQAPR |
| | | | | GLIGGTKFLAPGTPARFSGSLLGGKAALTLSGVQPEDEAEYYCVLWYSNRWVFGGGTKLTVL |
| 213 | EGF-3 | DLL3-6 | bispecific | QVQLQESGPGLVKPSETLSLTCTVSGASISSFYWSWIRQPPGKGLEWIGYIYYSGTTNYNPS |
| | | xF12Q | molecule | LKSRVTISVDTSKNQFSLKLSSVTAADTAVYYCARIAVAGFFFDYWGQGTLVTVSSGGGGSG |
| | | | | GGGSGGGGSEIVLTQSPGTLSLSPGERATLSCRASQSVNKNYLAWYQQKPGQAPRLLIYGAS |
| | | | | SRATGIPDRFSGSGSGTDFTLTISRLEPEDFAVYYCQQYDRSPLTFGGGTKVEIKSGGGGSE |
| | | | | VQLVESGGGLVQPGGSLRLSCAASGFTFNSYAMNWVRQAPGKGLEWVARIRSKYNNYATYYA |
| | | | | DSVKGRFTISRDDSKNTAYLQMNSLKTEDTAVYYCVRHGNFGNSYVSWWAYWGQGTLVTVSS |
| | | | | GGGGSGGGGSGGGGSQTVVTQEPSLTVSPGGTVTLTCGSSTGAVTSGNYPNWVQQKPGQAPR |
| | | | | GLIGGTKFLAPGTPARFSGSLLGGKAALTLSGVQPEDEAEYYCVLWYSNRWVFGGGTKLTVL |
| 214 | EGF-3 | DLL3-7 | bispecific | QVQLQESGPGLVKPSQTLSLTCTVSGASISSFYWSWIRQPPGKGLEWIGYIYYSGTTNYNPS |
| | | xF12Q | molecule | LKSRVTISVDTSKNQFSLKLSSVTAADTAVYYCARIAVAGFFFDYWGQGTLVTVSSGGGGSG |
| | | | | GGGSGGGGSEIVLTQSPGTLSLSPGERATLSCRASQSVNKNYLAWYQQKPGQAPRLLIYGAS |
| | | | | SRATGIPDRFSGSGSGTDFTLTISRLEPEDFAVYYCQQYDRSPLTFGGGTKVEIKSGGGGSE |
| | | | | VQLVESGGGLVQPGGSLRLSCAASGFTFNSYAMNWVRQAPGKGLEWVARIRSKYNNYATYYA |
| | | | | DSVKGRFTISRDDSKNTAYLQMNSLKTEDTAVYYCVRHGNFGNSYVSWWAYWGQGTLVTVSS |
| | | | | GGGGSGGGGSGGGGSQTVVTQEPSLTVSPGGTVTLTCGSSTGAVTSGNYPNWVQQKPGQAPR |
| | | | | GLIGGTKFLAPGTPARFSGSLLGGKAALTLSGVQPEDEAEYYCVLWYSNRWVFGGGTKLTVL |
| 215 | EGF-3 | DLL3-8 | bispecific | QVQLQEWGPGLVKPSETLSLTCTVSGASISSFYWSWIRQPPGKGLEWIGYIYYSGTTNYNPS |
| | | xF12Q | molecule | LKSRVTISVDTSKNQLSLKLSSVTAADTAVYYCARIAVAGFFFDYWGQGTLVTVSSGGGGSG |
| | | | | GGGSGGGGSEIVLTQSPGTLSLSPGERATLSCRASQSVNKNYLAWYQQKPGQAPRLLIYGAS |
| | | | | SRATGIPDRFSGSGSGTDFTLTISRLEPEDFAVYYCQQYDRSPLTFGGGTKVDIKSGGGGSE |
| | | | | VQLVESGGGLVQPGGSLRLSCAASGFTFNSYAMNWVRQAPGKGLEWVARIRSKYNNYATYYA |
| | | | | DSVKGRFTISRDDSKNTAYLQMNSLKTEDTAVYYCVRHGNFGNSYVSWWAYWGQGTLVTVSS |
| | | | | GGGGSGGGGSGGGGSQTVVTQEPSLTVSPGGTVTLTCGSSTGAVTSGNYPNWVQQKPGQAPR |
| | | | | GLIGGTKFLAPGTPARFSGSLLGGKAALTLSGVQPEDEAEYYCVLWYSNRWVFGGGTKLTVL |
| 216 | EGF-3 | DLL3-9 | bispecific | QVQLQESGPGLVKPSETLSLTCTVSGASISSFYWSWIRQPPGKGLEWIGYIYYSGTTNYNPS |
| | | xF12Q | molecule | LKSRVTISVDTSKNQFSLKLSSVTAADTAVYYCARIAVAGFFFDYWGQGTLVTVSSGGGGSG |
| | | | | GGGSGGGGSEIVLTQSPGTLSLSPGESATLSCRASQSVNKNYLAWYQQKPGQAPRLLIYGAS |
| | | | | SRATGIPDRFSGSGSGTDFTLTISRLEPEDFAVYYCQQYDRSPLTFGGGTRLEIKSGGGGSE |
| | | | | VQLVESGGGLVQPGGSLRLSCAASGFTFNSYAMNWVRQAPGKGLEWVARIRSKYNNYATYYA |
| | | | | DSVKGRFTISRDDSKNTAYLQMNSLKTEDTAVYYCVRHGNFGNSYVSWWAYWGQGTLVTVSS |
| | | | | GGGGSGGGGSGGGGSQTVVTQEPSLTVSPGGTVTLTCGSSTGAVTSGNYPNWVQQKPGQAPR |
| | | | | GLIGGTKFLAPGTPARFSGSLLGGKAALTLSGVQPEDEAEYYCVLWYSNRWVFGGGTKLTVL |
| 217 | EGF-3 | DLL3-10 | bispecific | QVQLQESGPGLVKPSQTLSLTCTVSGGSISSYYWSWIRQPPGKGLEWIGYIFYNGITNYNPS |
| | | xF12Q | molecule | LKSRVTISLDTSKNQFSLKLSSVTAADTAKYYCARIHSGSFSFDYWDQGTLVTVSSGGGGSG |
| | | | | GGGSGGGGSEIVMTQSPGTLSLSPGERATLSCRASQSVSRGYLAWYQQKPGQAPRLLIYGAS |
| | | | | SRATDIPDRFSGSGSGTDFTLTISRLEPEDFAVYYCQQYDTSPITFGQGTKVEIKSGGGGSE |
| | | | | VQLVESGGGLVQPGGSLRLSCAASGFTFNSYAMNWVRQAPGKGLEWVARIRSKYNNYATYYA |
| | | | | DSVKGRFTISRDDSKNTAYLQMNSLKTEDTAVYYCVRHGNFGNSYVSWWAYWGQGTLVTVSS |
| | | | | GGGGSGGGGSGGGGSQTVVTQEPSLTVSPGGTVTLTCGSSTGAVTSGNYPNWVQQKPGQAPR |
| | | | | GLIGGTKFLAPGTPARFSGSLLGGKAALTLSGVQPEDEAEYYCVLWYSNRWVFGGGTKLTVL |
| 218 | EGF-4 | DLL3-13 | bispecific | QVQLVQSGAEVKKPGASVKVSCKASGYTFTSYYMHWVRQAPGQGLEWMGIINPSDGSTNYAQ |
| | | xF12Q | molecule | NFQGRVTMTRDTSTNTVYMELSSLRSEDTAVYYCARGGNSAFYSYYDMDVWGQGTTVTVSSG |
| | | | | GGGSGGGGSGGGGSDVVMTQSPLSLPVTLGQPASISCRSSQSLVYRDGNTYLSWFQQRPGQS |
| | | | | PRRLIYKVSNWQSGVPDRFSGSGSGTDFTLKISRVEAEDVGVYFCMQGTHWPPTFGQGTKVE |
| | | | | IKSGGGGSEVQLVESGGGLVQPGGSLRLSCAASGFTFNSYAMNWVRQAPGKGLEWVARIRSK |
| | | | | YNNYATYYADSVKGRFTISRDDSKNTAYLQMNSLKTEDTAVYYCVRHGNFGNSYVSWWAYWG |
| | | | | QGTLVTVSSGGGGSGGGGSGGGGSQTVVTQEPSLTVSPGGTVTLTCGSSTGAVTSGNYPNWV |
| | | | | QQKPGQAPRGLIGGTKFLAPGTPARFSGSLLGGKAALTLSGVQPEDEAEYYCVLWYSNRWVF |
| | | | | GGGTKLTVL |
| 219 | EGF-4 | DLL3-14 | bispecific | QVQLVQSGAEVKKPGASVKVSCKASGYTFTNYYMHWVRQAPGLGLEWMGIINPSDGSTSYAQ |
| | | xF12Q | molecule | KFQGRVTMTRDTSTNTVYMDLSSLRSEDTAVYYCARGGNSAFYSYYDMDVWGQGTTVTVSSG |
| | | | | GGGSGGGGSGGGGSDVVMTQTPLSLPVTLGQPASISCRSSQSLVYRDGNTYLSWFQQRPGQS |
| | | | | PRRLIYKVSNWQSGVPDRFSGGGSGTDFTLKISRVEAEDVGVYYCMQGTHWPPTFGQGTKVE |
| | | | | IKSGGGGSEVQLVESGGGLVQPGGSLRLSCAASGFTFNSYAMNWVRQAPGKGLEWVARIRSK |
| | | | | YNNYATYYADSVKGRFTISRDDSKNTAYLQMNSLKTEDTAVYYCVRHGNFGNSYVSWWAYWG |
| | | | | QGTLVTVSSGGGGSGGGGSGGGGSQTVVTQEPSLTVSPGGTVTLTCGSSTGAVTSGNYPNWV |
| | | | | QQKPGQAPRGLIGGTKFLAPGTPARFSGSLLGGKAALTLSGVQPEDEAEYYCVLWYSNRWVF |
| | | | | GGGTKLTVL |
| 220 | EGF-4 | DLL3-15 | bispecific | QVQLVQSGAEVKKPGASVKVSCKASGYTFTGYYIHWVRQAPGQGLEWMGIINPSDGSTSYGQ |
| | | xF12Q | molecule | NFQGRVTMTRDTSTNTVYMELSSLRSEDTAVYYCARGGNSAFYSYYDMDVWGQGTTVTVSSG |
| | | | | GGGSGGGGSGGGGSDVVMTQSPLSLPVTLGQPASISCRSSQSLAYRDGNTYLSWFQQRPGQS |
| | | | | PRRLIYKVSNWQSGVPDRFSGSGSGTDFTLKISRVEAEDVGVYFCMQGTHWPPTFGQGTKVE |
| | | | | IKSGGGGSEVQLVESGGGLVQPGGSLRLSCAASGFTFNSYAMNWVRQAPGKGLEWVARIRSK |
| | | | | YNNYATYYADSVKGRFTISRDDSKNTAYLQMNSLKTEDTAVYYCVRHGNFGNSYVSWWAYWG |
| | | | | QGTLVTVSSGGGGSGGGGSGGGGSQTVVTQEPSLTVSPGGTVTLTCGSSTGAVTSGNYPNWV |
| | | | | QQKPGQAPRGLIGGTKFLAPGTPARFSGSLLGGKAALTLSGVQPEDEAEYYCVLWYSNRWVF |
| | | | | GGGTKLTVL |
| 221 | N-term. | DLL3-1 | bispecific | QVQLVESGGGVVQSGRSLRLSCAASGFTFSDYGIHWVRQAPGKGLEWVAVISYHGSNKYYAR |
| | | x12C- | molecule - | SVKGRFTVSRDNSKNTLYLQMNSLRAEDTAVYYCAREIPFGMDVWGQGTTVTVSSGGGGSGG |
| | | HALB | HALB | GGSGGGGSDIVMTQTPLSLPVTPGEPASISCRSSQSLLHSDGYNYLDWYLQKPGQSPQLLIY |
| | | variant 1 | variant 1 | LGSNRASGVPDRFSGSGSGTDFTLTISRVEAEDVGVYYCMQALQTPLTFGGGTKVDIKSGGG |
| | | | | GSEVQLVESGGGLVQPGGSLKLSCAASGFTFNKYAMNWVRQAPGKGLEWVARIRSKYNNYAT |
| | | | | YYADSVKDRFTISRDDSKNTAYLQMNNLKTEDTAVYYCVRHGNFGNSYISYWAYWGQGTLVT |
| | | | | VSSGGGGSGGGGSGGGGSQTVVTQEPSLTVSPGGTVTLTCGSSTGAVTSGNYPNWVQQKPGQ |
| | | | | APRGLIGGTKFLAPGTPARFSGSLLGGKAALTLSGVQPEDEAEYYCVLWYSNRWVFGGGTKL |
| | | | | TVLPGGGGSDAHKSEVAHRFKDLGEENFKALVLIAFAQYLQQCPFEDHVKLVNEVTEFAKTC |
| | | | | VADESAENCDKSLHTLFGDKLCTVATLRETYGEMADCCAKQEPERNECFLQHKDDNPNLPRL |
| | | | | VRPEVDVMCTAFHDNEETFLKKYLYEIARRHPYFYAPELLFFAKRYKAAFTECCQAADKAAC |
| | | | | LLPKLDELRDEGKASSAKQRLKCASLQKFGERAFKAWAVARLSQRFPKAEFAEVSKLVTDLT |
| | | | | KVHTECCHGDLLECADDRADLAKYICENQDSISSKLKECCEKPLLEKSHCIAEVENDEMPAD |
| | | | | LPSLAADFVESKDVCKNYAEAKDVFLGMFLYEYARRHPDYSVVLLLRLAKTYETTLEKCCAA |
| | | | | ADPHECYAKVFDEFKPLVEEPQNLIKQNCELFEQLGEYKFQNALLVRYTKKVPQVSTPTLVE |
| | | | | VSRNLGKVGSKCCKHPEAKRMPCAEDYLSVVLNQLCVLHEKTPVSDRVTKCCTESLVNRRPC |
| | | | | FSALEVDETYVPKEFNAGTFTFHADICTLSEKERQIKKQTALVELVKHKPKATKEQLKAAMD |
| | | | | DFAAFVEKCCKADDKETCFAEEGKKLVAASQAALGLHHHHHH |
| 222 | N-term. | DLL3-2 | bispecific | QVQLVQSGAEVKKPGASVKVSCKASGYTFTGYYMHWVRQAPGQGLEWMGWINPNSGDTNYAQ |
| | | xI2C- | molecule - | KFQGRVTMTRDTSISTAYMELSRLTSDDTAVYYCARDANIAALDAFEIWGQGTMVTVSSGGG |
| | | HALB | HALB | GSGGGGSGGGGSDIQMTQSPSSLSASVGDRVTITCRASQSISSYLNWYQQKPGKAPKLLIYA |
| | | variant 1 | variant 1 | ASSLQSGVPSRFSGSGSGTDFTLTISSLQPEDFATYYCQQSYSTPLTFGGGTKVEIKSGGGG |
| | | | | SEVQLVESGGGLVQPGGSLKLSCAASGFTFNKYAMNWVRQAPGKGLEWVARIRSKYNNYATY |
| | | | | YADSVKDRFTISRDDSKNTAYLQMNNLKTEDTAVYYCVRHGNFGNSYISYWAYWGQGTLVTV |
| | | | | SSGGGGSGGGGSGGGGSQTVVTQEPSLTVSPGGTVTLTCGSSTGAVTSGNYPNWVQQKPGQA |
| | | | | PRGLIGGTKFLAPGTPARFSGSLLGGKAALTLSGVQPEDEAEYYCVLWYSNRWVFGGGTKLT |
| | | | | VLPGGGGSDAHKSEVAHRFKDLGEENFKALVLIAFAQYLQQCPFEDHVKLVNEVTEFAKTCV |
| | | | | ADESAENCDKSLHTLFGDKLCTVATLRETYGEMADCCAKQEPERNECFLQHKDDNPNLPRLV |
| | | | | RPEVDVMCTAFHDNEETFLKKYLYEIARRHPYFYAPELLFFAKRYKAAFTECCQAADKAACL |
| | | | | LPKLDELRDEGKASSAKQRLKCASLQKFGERAFKAWAVARLSQRFPKAEFAEVSKLVTDLTK |
| | | | | VHTECCHGDLLECADDRADLAKYICENQDSISSKLKECCEKPLLEKSHCIAEVENDEMPADL |
| | | | | PSLAADFVESKDVCKNYAEAKDVFLGMFLYEYARRHPDYSVVLLLRLAKTYETTLEKCCAAA |
| | | | | DPHECYAKVFDEFKPLVEEPQNLIKQNCELFEQLGEYKFQNALLVRYTKKVPQVSTPTLVEV |
| | | | | SRNLGKVGSKCCKHPEAKRMPCAEDYLSVVLNQLCVLHEKTPVSDRVTKCCTESLVNRRPCF |
| | | | | SALEVDETYVPKEFNAGTFTFHADICTLSEKERQIKKQTALVELVKHKPKATKEQLKAAMDD |
| | | | | FAAFVEKCCKADDKETCFAEEGKKLVAASQAALGLHHHHHH |
| 223 | EGF-1 | DLL3-3 | bispecific | QVQLVESGGGVVQPGRSLRLSCAASGFTFSSYGMHWVRQAPGKGLEWVAVISYHGRDTYYAR |
| | | xI2C- | molecule - | SVKGRFTISRDNSKNTLYLHMNSLRAEDTAVYYCARDGATVTSYYYSGMDVWGQGTTVTVSS |
| | | HALB | HALB | GGGGSGGGGSGGGGSDIQMTQSPSSLSASVGDRVTITCRASQGISNYLAWFQQKPGKAPKSL |
| | | | | IYLASSLQSGVPSKFSGSGSGTDFTLTISSLQPEDFATYYCQQYNFYPFTFGPGTKVDIKSG |
| | | | | GGGSEVQLVESGGGLVQPGGSLKLSCAASGFTFNKYAMNWVRQAPGKGLEWVARIRSKYNNY |
| | | | | ATYYADSVKDRFTISRDDSKNTAYLQMNNLKTEDTAVYYCVRHGNFGNSYISYWAYWGQGTL |
| | | | | VTVSSGGGGSGGGGSGGGGSQTVVTQEPSLTVSPGGTVTLTCGSSTGAVTSGNYPNWVQQKP |
| | | | | GQAPRGLIGGTKFLAPGTPARFSGSLLGGKAALTLSGVQPEDEAEYYCVLWYSNRWVFGGGT |
| | | | | KLTVLPGGGGSDAHKSEVAHRFKDLGEENFKALVLIAFAQYLQQCPFEDHVKLVNEVTEFAK |
| | | | | TCVADESAENCDKSLHTLFGDKLCTVATLRETYGEMADCCAKQEPERNECFLQHKDDNPNLP |
| | | | | RLVRPEVDVMCTAFHDNEETFLKKYLYEIARRHPYFYAPELLFFAKRYKAAFTECCQAADKA |
| | | | | ACLLPKLDELRDEGKASSAKQRLKCASLQKFGERAFKAWAVARLSQRFPKAEFAEVSKLVTD |
| | | | | LTKVHTECCHGDLLECADDRADLAKYICENQDSISSKLKECCEKPLLEKSHCIAEVENDEMP |
| | | | | ADLPSLAADFVESKDVCKNYAEAKDVFLGMFLYEYARRHPDYSVVLLLRLAKTYETTLEKCC |
| | | | | AAADPHECYAKVFDEFKPLVEEPQNLIKQNCELFEQLGEYKFQNALLVRYTKKVPQVSTPTL |
| | | | | VEVSRNLGKVGSKCCKHPEAKRMPCAEDYLSVVLNQLCVLHEKTPVSDRVTKCCTESLVNRR |
| | | | | PCFSALEVDETYVPKEFNAETFTFHADICTLSEKERQIKKQTALVELVKHKPKATKEQLKAV |
| | | | | MDDFAAFVEKCCKADDKETCFAEEGKKLVAASQAALGLHHHHHH |
| 224 | EGF-3 | DLL3-4 | bispecific | QVQLQESGPGLVKPSETLSLTCTVSGGSISSYYWSWIRQPPGKGLEWIGYVYYSGTTNYNPS |
| | | xI2C- | molecule - | LKSRVTISVDTSKNQFSLKLSSVTAADTAVYYCASIAVTGFYFDYWGQGTLVTVSSGGGGSG |
| | | HALB | HALB | GGGSGGGGSEIVLTQSPGTLSLSPGERVTLSCRASQRVNNNYLAWYQQRPGQAPRLLIYGAS |
| | | | | SRATGIPDRFSGSGSGTDFTLTISRLEPEDFAVYYCQQYDRSPLTFGGGTKLEIKSGGGGSE |
| | | | | VQLVESGGGLVQPGGSLKLSCAASGFTFNKYAMNWVRQAPGKGLEWVARIRSKYNNYATYYA |
| | | | | DSVKDRFTISRDDSKNTAYLQMNNLKTEDTAVYYCVRHGNFGNSYISYWAYWGQGTLVTVSS |
| | | | | GGGGSGGGGSGGGGSQTVVTQEPSLTVSPGGTVTLTCGSSTGAVTSGNYPNWVQQKPGQAPR |
| | | | | GLIGGTKFLAPGTPARFSGSLLGGKAALTLSGVQPEDEAEYYCVLWYSNRWVFGGGTKLTVL |
| | | | | PGGGGSDAHKSEVAHRFKDLGEENFKALVLIAFAQYLQQCPFEDHVKLVNEVTEFAKTCVAD |
| | | | | ESAENCDKSLHTLFGDKLCTVATLRETYGEMADCCAKQEPERNECFLQHKDDNPNLPRLVRP |
| | | | | EVDVMCTAFHDNEETFLKKYLYEIARRHPYFYAPELLFFAKRYKAAFTECCQAADKAACLLP |
| | | | | KLDELRDEGKASSAKQRLKCASLQKFGERAFKAWAVARLSQRFPKAEFAEVSKLVTDLTKVH |
| | | | | TECCHGDLLECADDRADLAKYICENQDSISSKLKECCEKPLLEKSHCIAEVENDEMPADLPS |
| | | | | LAADFVESKDVCKNYAEAKDVFLGMFLYEYARRHPDYSVVLLLRLAKTYETTLEKCCAAADP |
| | | | | HECYAKVFDEFKPLVEEPQNLIKQNCELFEQLGEYKFQNALLVRYTKKVPQVSTPTLVEVSR |
| | | | | NLGKVGSKCCKHPEAKRMPCAEDYLSVVLNQLCVLHEKTPVSDRVTKCCTESLVNRRPCFSA |
| | | | | LEVDETYVPKEFNAETFTFHADICTLSEKERQIKKQTALVELVKHKPKATKEQLKAVMDDFA |
| | | | | AFVEKCCKADDKETCFAEEGKKLVAASQAALGLHHHHHH |
| 225 | EGF-3 | DLL3-5 | bispecific | QVQLQESGPGLVKPSETLSLTCTVSGGSISSYYWSWIRQPPGKGLEWIGYIYYSGRTNYYPS |
| | | xI2C- | molecule - | LKSRVTISIDTSKNQFSLKLSSVTAADTAVYYCARIAVAGFFFDYWGQGTLVTVSSGGGGSG |
| | | HALB | HALB | GGGSGGGGSEIVLTQSPGTLSLSPGERATLSCRASQSVNKNYLAWYQQKPGQAPRLLIYGAS |
| | | | | SRATGIPDRFSGSGSGTDFTLTISRLEPEDFAVYYCQQYDRSPLTFGGGTKLEIKSGGGGSE |
| | | | | VQLVESGGGLVQPGGSLKLSCAASGFTFNKYAMNWVRQAPGKGLEWVARIRSKYNNYATYYA |
| | | | | DSVKDRFTISRDDSKNTAYLQMNNLKTEDTAVYYCVRHGNFGNSYISYWAYWGQGTLVTVSS |
| | | | | GGGGSGGGGSGGGGSQTVVTQEPSLTVSPGGTVTLTCGSSTGAVTSGNYPNWVQQKPGQAPR |
| | | | | GLIGGTKFLAPGTPARFSGSLLGGKAALTLSGVQPEDEAEYYCVLWYSNRWVFGGGTKLTVL |
| | | | | PGGGGSDAHKSEVAHRFKDLGEENFKALVLIAFAQYLQQCPFEDHVKLVNEVTEFAKTCVAD |
| | | | | ESAENCDKSLHTLFGDKLCTVATLRETYGEMADCCAKQEPERNECFLQHKDDNPNLPRLVRP |
| | | | | EVDVMCTAFHDNEETFLKKYLYEIARRHPYFYAPELLFFAKRYKAAFTECCQAADKAACLLP |
| | | | | KLDELRDEGKASSAKQRLKCASLQKFGERAFKAWAVARLSQRFPKAEFAEVSKLVTDLTKVH |
| | | | | TECCHGDLLECADDRADLAKYICENQDSISSKLKECCEKPLLEKSHCIAEVENDEMPADLPS |
| | | | | LAADFVESKDVCKNYAEAKDVFLGMFLYEYARRHPDYSVVLLLRLAKTYETTLEKCCAAADP |
| | | | | HECYAKVFDEFKPLVEEPQNLIKQNCELFEQLGEYKFQNALLVRYTKKVPQVSTPTLVEVSR |
| | | | | NLGKVGSKCCKHPEAKRMPCAEDYLSVVLNQLCVLHEKTPVSDRVTKCCTESLVNRRPCFSA |
| | | | | LEVDETYVPKEFNAETFTFHADICTLSEKERQIKKQTALVELVKHKPKATKEQLKAVMDDFA |
| | | | | AFVEKCCKADDKETCFAEEGKKLVAASQAALGLHHHHHH |
| 226 | EGF-3 | DLL3-6 | bispecific | QVQLQESGPGLVKPSETLSLTCTVSGASISSFYWSWIRQPPGKGLEWIGYIYYSGTTNYNPS |
| | | xI2C- | molecule - | LKSRVTISVDTSKNQFSLKLSSVTAADTAVYYCARIAVAGFFFDYWGQGTLVTVSSGGGGSG |
| | | HALB | HALB | GGGSGGGGSEIVLTQSPGTLSLSPGERATLSCRASQSVNKNYLAWYQQKPGQAPRLLIYGAS |
| | | | | SRATGIPDRFSGSGSGTDFTLTISRLEPEDFAVYYCQQYDRSPLTFGGGTKVEIKSGGGGSE |
| | | | | VQLVESGGGLVQPGGSLKLSCAASGFTFNKYAMNWVRQAPGKGLEWVARIRSKYNNYATYYA |
| | | | | DSVKDRFTISRDDSKNTAYLQMNNLKTEDTAVYYCVRHGNFGNSYISYWAYWGQGTLVTVSS |
| | | | | GGGGSGGGGSGGGGSQTVVTQEPSLTVSPGGTVTLTCGSSTGAVTSGNYPNWVQQKPGQAPR |
| | | | | GLIGGTKFLAPGTPARFSGSLLGGKAALTLSGVQPEDEAEYYCVLWYSNRWVFGGGTKLTVL |
| | | | | PGGGGSDAHKSEVAHRFKDLGEENFKALVLIAFAQYLQQCPFEDHVKLVNEVTEFAKTCVAD |
| | | | | ESAENCDKSLHTLFGDKLCTVATLRETYGEMADCCAKQEPERNECFLQHKDDNPNLPRLVRP |
| | | | | EVDVMCTAFHDNEETFLKKYLYEIARRHPYFYAPELLFFAKRYKAAFTECCQAADKAACLLP |
| | | | | KLDELRDEGKASSAKQRLKCASLQKFGERAFKAWAVARLSQRFPKAEFAEVSKLVTDLTKVH |
| | | | | TECCHGDLLECADDRADLAKYICENQDSISSKLKECCEKPLLEKSHCIAEVENDEMPADLPS |
| | | | | LAADFVESKDVCKNYAEAKDVFLGMFLYEYARRHPDYSVVLLLRLAKTYETTLEKCCAAADP |
| | | | | HECYAKVFDEFKPLVEEPQNLIKQNCELFEQLGEYKFQNALLVRYTKKVPQVSTPTLVEVSR |
| | | | | NLGKVGSKCCKHPEAKRMPCAEDYLSVVLNQLCVLHEKTPVSDRVTKCCTESLVNRRPCFSA |
| | | | | LEVDETYVPKEFNAETFTFHADICTLSEKERQIKKQTALVELVKHKPKATKEQLKAVMDDFA |
| | | | | AFVEKCCKADDKETCFAEEGKKLVAASQAALGLHHHHHH |
| 227 | EGF-3 | DLL3-7 | bispecific | QVQLQESGPGLVKPSQTLSLTCTVSGASISSFYWSWIRQPPGKGLEWIGYIYYSGTTNYNPS |
| | | xI2C- | molecule - | LKSRVTISVDTSKNQFSLKLSSVTAADTAVYYCARIAVAGFFFDYWGQGTLVTVSSGGGGSG |
| | | HALB | HALB | GGGSGGGGSEIVLTQSPGTLSLSPGERATLSCRASQSVNKNYLAWYQQKPGQAPRLLIYGAS |
| | | | | SRATGIPDRFSGSGSGTDFTLTISRLEPEDFAVYYCQQYDRSPLTFGGGTKVEIKSGGGGSE |
| | | | | VQLVESGGGLVQPGGSLKLSCAASGFTFNKYAMNWVRQAPGKGLEWVARIRSKYNNYATYYA |
| | | | | DSVKDRFTISRDDSKNTAYLQMNNLKTEDTAVYYCVRHGNFGNSYISYWAYWGQGTLVTVSS |
| | | | | GGGGSGGGGSGGGGSQTVVTQEPSLTVSPGGTVTLTCGSSTGAVTSGNYPNWVQQKPGQAPR |
| | | | | GLIGGTKFLAPGTPARFSGSLLGGKAALTLSGVQPEDEAEYYCVLWYSNRWVFGGGTKLTVL |
| | | | | PGGGGSDAHKSEVAHRFKDLGEENFKALVLIAFAQYLQQCPFEDHVKLVNEVTEFAKTCVAD |
| | | | | ESAENCDKSLHTLFGDKLCTVATLRETYGEMADCCAKQEPERNECFLQHKDDNPNLPRLVRP |
| | | | | EVDVMCTAFHDNEETFLKKYLYEIARRHPYFYAPELLFFAKRYKAAFTECCQAADKAACLLP |
| | | | | KLDELRDEGKASSAKQRLKCASLQKFGERAFKAWAVARLSQRFPKAEFAEVSKLVTDLTKVH |
| | | | | TECCHGDLLECADDRADLAKYICENQDSISSKLKECCEKPLLEKSHCIAEVENDEMPADLPS |
| | | | | LAADFVESKDVCKNYAEAKDVFLGMFLYEYARRHPDYSVVLLLRLAKTYETTLEKCCAAADP |
| | | | | HECYAKVFDEFKPLVEEPQNLIKQNCELFEQLGEYKFQNALLVRYTKKVPQVSTPTLVEVSR |
| | | | | NLGKVGSKCCKHPEAKRMPCAEDYLSVVLNQLCVLHEKTPVSDRVTKCCTESLVNRRPCFSA |
| | | | | LEVDETYVPKEFNAETFTFHADICTLSEKERQIKKQTALVELVKHKPKATKEQLKAVMDDFA |
| | | | | AFVEKCCKADDKETCFAEEGKKLVAASQAALGLHHHHHH |
| 228 | EGF-3 | DLL3-8 | bispecific | QVQLQEWGPGLVKPSETLSLTCTVSGASISSFYWSWIRQPPGKGLEWIGYIYYSGTTNYNPS |
| | | xI2C- | molecule - | LKSRVTISVDTSKNQLSLKLSSVTAADTAVYYCARIAVAGFFFDYWGQGTLVTVSSGGGGSG |
| | | HALB | HALB | GGGSGGGGSEIVLTQSPGTLSLSPGERATLSCRASQSVNKNYLAWYQQKPGQAPRLLIYGAS |
| | | | | SRATGIPDRFSGSGSGTDFTLTISRLEPEDFAVYYCQQYDRSPLTFGGGTKVDIKSGGGGSE |
| | | | | VQLVESGGGLVQPGGSLKLSCAASGFTFNKYAMNWVRQAPGKGLEWVARIRSKYNNYATYYA |
| | | | | DSVKDRFTISRDDSKNTAYLQMNNLKTEDTAVYYCVRHGNFGNSYISYWAYWGQGTLVTVSS |
| | | | | GGGGSGGGGSGGGGSQTVVTQEPSLTVSPGGTVTLTCGSSTGAVTSGNYPNWVQQKPGQAPR |
| | | | | GLIGGTKFLAPGTPARFSGSLLGGKAALTLSGVQPEDEAEYYCVLWYSNRWVFGGGTKLTVL |
| | | | | PGGGGSDAHKSEVAHRFKDLGEENFKALVLIAFAQYLQQCPFEDHVKLVNEVTEFAKTCVAD |
| | | | | ESAENCDKSLHTLFGDKLCTVATLRETYGEMADCCAKQEPERNECFLQHKDDNPNLPRLVRP |
| | | | | EVDVMCTAFHDNEETFLKKYLYEIARRHPYFYAPELLFFAKRYKAAFTECCQAADKAACLLP |
| | | | | KLDELRDEGKASSAKQRLKCASLQKFGERAFKAWAVARLSQRFPKAEFAEVSKLVTDLTKVH |
| | | | | TECCHGDLLECADDRADLAKYICENQDSISSKLKECCEKPLLEKSHCIAEVENDEMPADLPS |
| | | | | LAADFVESKDVCKNYAEAKDVFLGMFLYEYARRHPDYSVVLLLRLAKTYETTLEKCCAAADP |
| | | | | HECYAKVFDEFKPLVEEPQNLIKQNCELFEQLGEYKFQNALLVRYTKKVPQVSTPTLVEVSR |
| | | | | NLGKVGSKCCKHPEAKRMPCAEDYLSVVLNQLCVLHEKTPVSDRVTKCCTESLVNRRPCFSA |
| | | | | LEVDETYVPKEFNAETFTFHADICTLSEKERQIKKQTALVELVKHKPKATKEQLKAVMDDFA |
| | | | | AFVEKCCKADDKETCFAEEGKKLVAASQAALGLHHHHHH |
| 229 | EGF-3 | DLL3-9 | bispecific | QVQLQESGPGLVKPSETLSLTCTVSGASISSFYWSWIRQPPGKGLEWIGYIYYSGTTNYNPS |
| | | xI2C- | molecule - | LKSRVTISVDTSKNQFSLKLSSVTAADTAVYYCARIAVAGFFFDYWGQGTLVTVSSGGGGSG |
| | | HALB | HALB | GGGSGGGGSEIVLTQSPGTLSLSPGESATLSCRASQSVNKNYLAWYQQKPGQAPRLLIYGAS |
| | | | | SRATGIPDRFSGSGSGTDFTLTISRLEPEDFAVYYCQQYDRSPLTFGGGTRLEIKSGGGGSE |
| | | | | VQLVESGGGLVQPGGSLKLSCAASGFTFNKYAMNWVRQAPGKGLEWVARIRSKYNNYATYYA |
| | | | | DSVKDRFTISRDDSKNTAYLQMNNLKTEDTAVYYCVRHGNFGNSYISYWAYWGQGTLVTVSS |
| | | | | GGGGSGGGGSGGGGSQTVVTQEPSLTVSPGGTVTLTCGSSTGAVTSGNYPNWVQQKPGQAPR |
| | | | | GLIGGTKFLAPGTPARFSGSLLGGKAALTLSGVQPEDEAEYYCVLWYSNRWVFGGGTKLTVL |
| | | | | PGGGGSDAHKSEVAHRFKDLGEENFKALVLIAFAQYLQQCPFEDHVKLVNEVTEFAKTCVAD |
| | | | | ESAENCDKSLHTLFGDKLCTVATLRETYGEMADCCAKQEPERNECFLQHKDDNPNLPRLVRP |
| | | | | EVDVMCTAFHDNEETFLKKYLYEIARRHPYFYAPELLFFAKRYKAAFTECCQAADKAACLLP |
| | | | | KLDELRDEGKASSAKQRLKCASLQKFGERAFKAWAVARLSQRFPKAEFAEVSKLVTDLTKVH |
| | | | | TECCHGDLLECADDRADLAKYICENQDSISSKLKECCEKPLLEKSHCIAEVENDEMPADLPS |
| | | | | LAADFVESKDVCKNYAEAKDVFLGMFLYEYARRHPDYSVVLLLRLAKTYETTLEKCCAAADP |
| | | | | HECYAKVFDEFKPLVEEPQNLIKQNCELFEQLGEYKFQNALLVRYTKKVPQVSTPTLVEVSR |
| | | | | NLGKVGSKCCKHPEAKRMPCAEDYLSVVLNQLCVLHEKTPVSDRVTKCCTESLVNRRPCFSA |
| | | | | LEVDETYVPKEFNAETFTFHADICTLSEKERQIKKQTALVELVKHKPKATKEQLKAVMDDFA |
| | | | | AFVEKCCKADDKETCFAEEGKKLVAASQAALGLHHHHHH |
| 230 | EGF-3 | DLL3-10 | bispecific | QVQLQESGPGLVKPSQTLSLTCTVSGGSISSYYWSWIRQPPGKGLEWIGYIFYNGITNYNPS |
| | | xI2C- | molecule - | LKSRVTISLDTSKNQFSLKLSSVTAADTAKYYCARIHSGSFSFDYWDQGTLVTVSSGGGGSG |
| | | HALB | HALB | GGGSGGGGSEIVMTQSPGTLSLSPGERATLSCRASQSVSRGYLAWYQQKPGQAPRLLIYGAS |
| | | | | SRATDIPDRFSGSGSGTDFTLTISRLEPEDFAVYYCQQYDTSPITFGQGTKVEIKSGGGGSE |
| | | | | VQLVESGGGLVQPGGSLKLSCAASGFTFNKYAMNWVRQAPGKGLEWVARIRSKYNNYATYYA |
| | | | | DSVKDRFTISRDDSKNTAYLQMNNLKTEDTAVYYCVRHGNFGNSYISYWAYWGQGTLVTVSS |
| | | | | GGGGSGGGGSGGGGSQTVVTQEPSLTVSPGGTVTLTCGSSTGAVTSGNYPNWVQQKPGQAPR |
| | | | | GLIGGTKFLAPGTPARFSGSLLGGKAALTLSGVQPEDEAEYYCVLWYSNRWVFGGGTKLTVL |
| | | | | PGGGGSDAHKSEVAHRFKDLGEENFKALVLIAFAQYLQQCPFEDHVKLVNEVTEFAKTCVAD |
| | | | | ESAENCDKSLHTLFGDKLCTVATLRETYGEMADCCAKQEPERNECFLQHKDDNPNLPRLVRP |
| | | | | EVDVMCTAFHDNEETFLKKYLYEIARRHPYFYAPELLFFAKRYKAAFTECCQAADKAACLLP |
| | | | | KLDELRDEGKASSAKQRLKCASLQKFGERAFKAWAVARLSQRFPKAEFAEVSKLVTDLTKVH |
| | | | | TECCHGDLLECADDRADLAKYICENQDSISSKLKECCEKPLLEKSHCIAEVENDEMPADLPS |
| | | | | LAADFVESKDVCKNYAEAKDVFLGMFLYEYARRHPDYSVVLLLRLAKTYETTLEKCCAAADP |
| | | | | HECYAKVFDEFKPLVEEPQNLIKQNCELFEQLGEYKFQNALLVRYTKKVPQVSTPTLVEVSR |
| | | | | NLGKVGSKCCKHPEAKRMPCAEDYLSVVLNQLCVLHEKTPVSDRVTKCCTESLVNRRPCFSA |
| | | | | LEVDETYVPKEFNAETFTFHADICTLSEKERQIKKQTALVELVKHKPKATKEQLKAVMDDFA |
| | | | | AFVEKCCKADDKETCFAEEGKKLVAASQAALGLHHHHHH |
| 231 | EGF-3 | DLL3-11 | bispecific | EVQLVESGGGLVKPGGSLRLSCAASGFIFNNAGMSWVRQAPGKGLEWVGRIKNKIDGGTTDF |
| | | xI2C- | molecule - | AAPVKGRFTISRDDSKNTLYLQMNSLKAEDTAVYYCTARGWYGDYFDYWGQGTLVTVSSGGG |
| | | HALB | HALB | GSGGGGSGGGGSDIVMTQTPLSLPVTPGEPASISCRSSQSLLHSNGYNYLDWYLQKPGQSPQ |
| | | | | LLIYLGSNRASGVPDRFSGSGSGTDFTLKISRVEAEDVGIYYCMQALQTPFTFGPGTKVEIK |
| | | | | SGGGGSEVQLVESGGGLVQPGGSLKLSCAASGFTFNKYAMNWVRQAPGKGLEWVARIRSKYN |
| | | | | NYATYYADSVKDRFTISRDDSKNTAYLQMNNLKTEDTAVYYCVRHGNFGNSYISYWAYWGQG |
| | | | | TLVTVSSGGGGSGGGGSGGGGSQTVVTQEPSLTVSPGGTVTLTCGSSTGAVTSGNYPNWVQQ |
| | | | | KPGQAPRGLIGGTKFLAPGTPARFSGSLLGGKAALTLSGVQPEDEAEYYCVLWYSNRWVFGG |
| | | | | GTKLTVLPGGGGSDAHKSEVAHRFKDLGEENFKALVLIAFAQYLQQCPFEDHVKLVNEVTEF |
| | | | | AKTCVADESAENCDKSLHTLFGDKLCTVATLRETYGEMADCCAKQEPERNECFLQHKDDNPN |
| | | | | LPRLVRPEVDVMCTAFHDNEETFLKKYLYEIARRHPYFYAPELLFFAKRYKAAFTECCQAAD |
| | | | | KAACLLPKLDELRDEGKASSAKQRLKCASLQKFGERAFKAWAVARLSQRFPKAEFAEVSKLV |
| | | | | TDLTKVHTECCHGDLLECADDRADLAKYICENQDSISSKLKECCEKPLLEKSHCIAEVENDE |
| | | | | MPADLPSLAADFVESKDVCKNYAEAKDVFLGMFLYEYARRHPDYSVVLLLRLAKTYETTLEK |
| | | | | CCAAADPHECYAKVFDEFKPLVEEPQNLIKQNCELFEQLGEYKFQNALLVRYTKKVPQVSTP |
| | | | | TLVEVSRNLGKVGSKCCKHPEAKRMPCAEDYLSVVLNQLCVLHEKTPVSDRVTKCCTESLVN |
| | | | | RRPCFSALEVDETYVPKEFNAETFTFHADICTLSEKERQIKKQTALVELVKHKPKATKEQLK |
| | | | | AVMDDFAAFVEKCCKADDKETCFAEEGKKLVAASQAALGLHHHHHH |
| 232 | EGF-3/[4] | DLL3-12 | bispecific | QVQLVESGGGVVQPGRSLRLSCAASGFSFSSYDIHWVRQAPGKGLEWVAVISSHGSNKNYAR |
| | | xI2C- | molecule - | SVKGRFTISRDNSKNTLYLQMNSLKAEDTAVYYCARDGYSGNDPFYYYYHGMDVWGQGTTVT |
| | | HALB | HALB | VSSGGGGSGGGGSGGGGSDIQMTQSPSSLSASVGDRVTITCRASQSISSYLNWYQQKPGKAP |
| | | | | KLLIYAASSLQSGVPSRFSGSGSGTDFSLTISSLQPEDFATYYCQQSFTTPLTFGGGTKVEI |
| | | | | KSGGGGSEVQLVESGGGLVQPGGSLKLSCAASGFTFNKYAMNWVRQAPGKGLEWVARIRSKY |
| | | | | NNYATYYADSVKDRFTISRDDSKNTAYLQMNNLKTEDTAVYYCVRHGNFGNSYISYWAYWGQ |
| | | | | GTLVTVSSGGGGSGGGGSGGGGSQTVVTQEPSLTVSPGGTVTLTCGSSTGAVTSGNYPNWVQ |
| | | | | QKPGQAPRGLIGGTKFLAPGTPARFSGSLLGGKAALTLSGVQPEDEAEYYCVLWYSNRWVFG |
| | | | | GGTKLTVLPGGGGSDAHKSEVAHRFKDLGEENFKALVLIAFAQYLQQCPFEDHVKLVNEVTE |
| | | | | FAKTCVADESAENCDKSLHTLFGDKLCTVATLRETYGEMADCCAKQEPERNECFLQHKDDNP |
| | | | | NLPRLVRPEVDVMCTAFHDNEETFLKKYLYEIARRHPYFYAPELLFFAKRYKAAFTECCQAA |
| | | | | DKAACLLPKLDELRDEGKASSAKQRLKCASLQKFGERAFKAWAVARLSQRFPKAEFAEVSKL |
| | | | | VTDLTKVHTECCHGDLLECADDRADLAKYICENQDSISSKLKECCEKPLLEKSHCIAEVEND |
| | | | | EMPADLPSLAADFVESKDVCKNYAEAKDVFLGMFLYEYARRHPDYSVVLLLRLAKTYETTLE |
| | | | | KCCAAADPHECYAKVFDEFKPLVEEPQNLIKQNCELFEQLGEYKFQNALLVRYTKKVPQVST |
| | | | | PTLVEVSRNLGKVGSKCCKHPEAKRMPCAEDYLSVVLNQLCVLHEKTPVSDRVTKCCTESLV |
| | | | | NRRPCFSALEVDETYVPKEFNAETFTFHADICTLSEKERQIKKQTALVELVKHKPKATKEQL |
| | | | | KAVMDDFAAFVEKCCKADDKETCFAEEGKKLVAASQAALGLHHHHHH |
| 233 | EGF-4 | DLL3-13 | bispecific | QVQLVQSGAEVKKPGASVKVSCKASGYTFTSYYMHWVRQAPGQGLEWMGIINPSDGSTNYAQ |
| | | xI2C- | molecule - | NFQGRVTMTRDTSTNTVYMELSSLRSEDTAVYYCARGGNSAFYSYYDMDVWGQGTTVTVSSG |
| | | HALB | HALB | GGGSGGGGSGGGGSDVVMTQSPLSLPVTLGQPASISCRSSQSLVYRDGNTYLSWFQQRPGQS |
| | | | | PRRLIYKVSNWQSGVPDRFSGSGSGTDFTLKISRVEAEDVGVYFCMQGTHWPPTFGQGTKVE |
| | | | | IKSGGGGSEVQLVESGGGLVQPGGSLKLSCAASGFTFNKYAMNWVRQAPGKGLEWVARIRSK |
| | | | | YNNYATYYADSVKDRFTISRDDSKNTAYLQMNNLKTEDTAVYYCVRHGNFGNSYISYWAYWG |
| | | | | QGTLVTVSSGGGGSGGGGSGGGGSQTVVTQEPSLTVSPGGTVTLTCGSSTGAVTSGNYPNWV |
| | | | | QQKPGQAPRGLIGGTKFLAPGTPARFSGSLLGGKAALTLSGVQPEDEAEYYCVLWYSNRWVF |
| | | | | GGGTKLTVLPGGGGSDAHKSEVAHRFKDLGEENFKALVLIAFAQYLQQCPFEDHVKLVNEVT |
| | | | | EFAKTCVADESAENCDKSLHTLFGDKLCTVATLRETYGEMADCCAKQEPERNECFLQHKDDN |
| | | | | PNLPRLVRPEVDVMCTAFHDNEETFLKKYLYEIARRHPYFYAPELLFFAKRYKAAFTECCQA |
| | | | | ADKAACLLPKLDELRDEGKASSAKQRLKCASLQKFGERAFKAWAVARLSQRFPKAEFAEVSK |
| | | | | LVTDLTKVHTECCHGDLLECADDRADLAKYICENQDSISSKLKECCEKPLLEKSHCIAEVEN |
| | | | | DEMPADLPSLAADFVESKDVCKNYAEAKDVFLGMFLYEYARRHPDYSVVLLLRLAKTYETTL |
| | | | | EKCCAAADPHECYAKVFDEFKPLVEEPQNLIKQNCELFEQLGEYKFQNALLVRYTKKVPQVS |
| | | | | TPTLVEVSRNLGKVGSKCCKHPEAKRMPCAEDYLSVVLNQLCVLHEKTPVSDRVTKCCTESL |
| | | | | VNRRPCFSALEVDETYVPKEFNAETFTFHADICTLSEKERQIKKQTALVELVKHKPKATKEQ |
| | | | | LKAVMDDFAAFVEKCCKADDKETCFAEEGKKLVAASQAALGLHHHHHH |
| 234 | EGF-4 | DLL3-14 | bispecific | QVQLVQSGAEVKKPGASVKVSCKASGYTFTNYYMHWVRQAPGLGLEWMGIINPSDGSTSYAQ |
| | | xI2C- | molecule - | KFQGRVTMTRDTSTNTVYMDLSSLRSEDTAVYYCARGGNSAFYSYYDMDVWGQGTTVTVSSG |
| | | HALB | HALB | GGGSGGGGSGGGGSDVVMTQTPLSLPVTLGQPASISCRSSQSLVYRDGNTYLSWFQQRPGQS |
| | | | | PRRLIYKVSNWQSGVPDRFSGGGSGTDFTLKISRVEAEDVGVYYCMQGTHWPPTFGQGTKVE |
| | | | | IKSGGGGSEVQLVESGGGLVQPGGSLKLSCAASGFTFNKYAMNWVRQAPGKGLEWVARIRSK |
| | | | | YNNYATYYADSVKDRFTISRDDSKNTAYLQMNNLKTEDTAVYYCVRHGNFGNSYISYWAYWG |
| | | | | QGTLVTVSSGGGGSGGGGSGGGGSQTVVTQEPSLTVSPGGTVTLTCGSSTGAVTSGNYPNWV |
| | | | | QQKPGQAPRGLIGGTKFLAPGTPARFSGSLLGGKAALTLSGVQPEDEAEYYCVLWYSNRWVF |
| | | | | GGGTKLTVLPGGGGSDAHKSEVAHRFKDLGEENFKALVLIAFAQYLQQCPFEDHVKLVNEVT |
| | | | | EFAKTCVADESAENCDKSLHTLFGDKLCTVATLRETYGEMADCCAKQEPERNECFLQHKDDN |
| | | | | PNLPRLVRPEVDVMCTAFHDNEETFLKKYLYEIARRHPYFYAPELLFFAKRYKAAFTECCQA |
| | | | | ADKAACLLPKLDELRDEGKASSAKQRLKCASLQKFGERAFKAWAVARLSQRFPKAEFAEVSK |
| | | | | LVTDLTKVHTECCHGDLLECADDRADLAKYICENQDSISSKLKECCEKPLLEKSHCIAEVEN |
| | | | | DEMPADLPSLAADFVESKDVCKNYAEAKDVFLGMFLYEYARRHPDYSVVLLLRLAKTYETTL |
| | | | | EKCCAAADPHECYAKVFDEFKPLVEEPQNLIKQNCELFEQLGEYKFQNALLVRYTKKVPQVS |
| | | | | TPTLVEVSRNLGKVGSKCCKHPEAKRMPCAEDYLSVVLNQLCVLHEKTPVSDRVTKCCTESL |
| | | | | VNRRPCFSALEVDETYVPKEFNAETFTFHADICTLSEKERQIKKQTALVELVKHKPKATKEQ |
| | | | | LKAVMDDFAAFVEKCCKADDKETCFAEEGKKLVAASQAALGLHHHHHH |
| 235 | EGF-4 | DLL3-15 | bispecific | QVQLVQSGAEVKKPGASVKVSCKASGYTFTGYYIHWVRQAPGQGLEWMGIINPSDGSTSYGQ |
| | | xI2C- | molecule - | NFQGRVTMTRDTSTNTVYMELSSLRSEDTAVYYCARGGNSAFYSYYDMDVWGQGTTVTVSSG |
| | | HALB | HALB | GGGSGGGGSGGGGSDVVMTQSPLSLPVTLGQPASISCRSSQSLAYRDGNTYLSWFQQRPGQS |
| | | | | PRRLIYKVSNWQSGVPDRFSGSGSGTDFTLKISRVEAEDVGVYFCMQGTHWPPTFGQGTKVE |
| | | | | IKSGGGGSEVQLVESGGGLVQPGGSLKLSCAASGFTFNKYAMNWVRQAPGKGLEWVARIRSK |
| | | | | YNNYATYYADSVKDRFTISRDDSKNTAYLQMNNLKTEDTAVYYCVRHGNFGNSYISYWAYWG |
| | | | | QGTLVTVSSGGGGSGGGGSGGGGSQTVVTQEPSLTVSPGGTVTLTCGSSTGAVTSGNYPNWV |
| | | | | QQKPGQAPRGLIGGTKFLAPGTPARFSGSLLGGKAALTLSGVQPEDEAEYYCVLWYSNRWVF |
| | | | | GGGTKLTVLPGGGGSDAHKSEVAHRFKDLGEENFKALVLIAFAQYLQQCPFEDHVKLVNEVT |
| | | | | EFAKTCVADESAENCDKSLHTLFGDKLCTVATLRETYGEMADCCAKQEPERNECFLQHKDDN |
| | | | | PNLPRLVRPEVDVMCTAFHDNEETFLKKYLYEIARRHPYFYAPELLFFAKRYKAAFTECCQA |
| | | | | ADKAACLLPKLDELRDEGKASSAKQRLKCASLQKFGERAFKAWAVARLSQRFPKAEFAEVSK |
| | | | | LVTDLTKVHTECCHGDLLECADDRADLAKYICENQDSISSKLKECCEKPLLEKSHCIAEVEN |
| | | | | DEMPADLPSLAADFVESKDVCKNYAEAKDVFLGMFLYEYARRHPDYSVVLLLRLAKTYETTL |
| | | | | EKCCAAADPHECYAKVFDEFKPLVEEPQNLIKQNCELFEQLGEYKFQNALLVRYTKKVPQVS |
| | | | | TPTLVEVSRNLGKVGSKCCKHPEAKRMPCAEDYLSVVLNQLCVLHEKTPVSDRVTKCCTESL |
| | | | | VNRRPCFSALEVDETYVPKEFNAETFTFHADICTLSEKERQIKKQTALVELVKHKPKATKEQ |
| | | | | LKAVMDDFAAFVEKCCKADDKETCFAEEGKKLVAASQAALGLHHHHHH |
| 236 | EGF-4 | DLL3-16 | bispecific | QVQLVQSGAEVKKPGASVKVSCKASGYTFTGHYMHWVRQAPGQGLEWMGIINPSDGSTNYAQ |
| | | xI2C- | molecule - | KFQGRVTMTRDTSTSTVYMELRSLRSEDTAVYYCTRGTTVVHYSYYDMDVWGQGTTVTVSSG |
| | | HALB | HALB | GGGSGGGGSGGGGSDVVMTQTPLSLPVTLGQPASISCRSSQSLVYRDGNTYLTWFQQRPGQS |
| | | | | PRRLIYKVSNWQSGVPDRFSGSGSGTDFTLKISRVEAEDVGVYYCMQGTHWPPTFGGGTKVE |
| | | | | IKSGGGGSEVQLVESGGGLVQPGGSLKLSCAASGFTFNKYAMNWVRQAPGKGLEWVARIRSK |
| | | | | YNNYATYYADSVKDRFTISRDDSKNTAYLQMNNLKTEDTAVYYCVRHGNFGNSYISYWAYWG |
| | | | | QGTLVTVSSGGGGSGGGGSGGGGSQTVVTQEPSLTVSPGGTVTLTCGSSTGAVTSGNYPNWV |
| | | | | QQKPGQAPRGLIGGTKFLAPGTPARFSGSLLGGKAALTLSGVQPEDEAEYYCVLWYSNRWVF |
| | | | | GGGTKLTVLPGGGGSDAHKSEVAHRFKDLGEENFKALVLIAFAQYLQQCPFEDHVKLVNEVT |
| | | | | EFAKTCVADESAENCDKSLHTLFGDKLCTVATLRETYGEMADCCAKQEPERNECFLQHKDDN |
| | | | | PNLPRLVRPEVDVMCTAFHDNEETFLKKYLYEIARRHPYFYAPELLFFAKRYKAAFTECCQA |
| | | | | ADKAACLLPKLDELRDEGKASSAKQRLKCASLQKFGERAFKAWAVARLSQRFPKAEFAEVSK |
| | | | | LVTDLTKVHTECCHGDLLECADDRADLAKYICENQDSISSKLKECCEKPLLEKSHCIAEVEN |
| | | | | DEMPADLPSLAADFVESKDVCKNYAEAKDVFLGMFLYEYARRHPDYSVVLLLRLAKTYETTL |
| | | | | EKCCAAADPHECYAKVFDEFKPLVEEPQNLIKQNCELFEQLGEYKFQNALLVRYTKKVPQVS |
| | | | | TPTLVEVSRNLGKVGSKCCKHPEAKRMPCAEDYLSVVLNQLCVLHEKTPVSDRVTKCCTESL |
| | | | | VNRRPCFSALEVDETYVPKEFNAETFTFHADICTLSEKERQIKKQTALVELVKHKPKATKEQ |
| | | | | LKAVMDDFAAFVEKCCKADDKETCFAEEGKKLVAASQAALGLHHHHHH |
| 237 | EGF-4 | DL L3-17 | bispecific | QVQLVQSGAEVKKPGASVKVSCKASGYTFTNYFMHWVRQAPGLGLEWMGIINPSDGSTSYAQ |
| | | xI2C- | molecule - | NFQGRVTMTRDTSTNTVYMELSSLRSEDTAVYYCARGGNSAFYSYYDMDVWGQGTTVTVSSG |
| | | HALB | HALB | GGGSGGGGSGGGGSDVVMTQSPLSLPVTLGQPASISCRSSQSLVYRDGNTYLSWFQQRPGQS |
| | | | | PRRLIYRVSNWQSGVPDRFSGSGSGTDFTLKISRVEAEDVGVYFCMQGTYWPPTFGQGTKVD |
| | | | | IKSGGGGSEVQLVESGGGLVQPGGSLKLSCAASGFTFNKYAMNWVRQAPGKGLEWVARIRSK |
| | | | | YNNYATYYADSVKDRFTISRDDSKNTAYLQMNNLKTEDTAVYYCVRHGNFGNSYISYWAYWG |
| | | | | QGTLVTVSSGGGGSGGGGSGGGGSQTVVTQEPSLTVSPGGTVTLTCGSSTGAVTSGNYPNWV |
| | | | | QQKPGQAPRGLIGGTKFLAPGTPARFSGSLLGGKAALTLSGVQPEDEAEYYCVLWYSNRWVF |
| | | | | GGGTKLTVLPGGGGSDAHKSEVAHRFKDLGEENFKALVLIAFAQYLQQCPFEDHVKLVNEVT |
| | | | | EFAKTCVADESAENCDKSLHTLFGDKLCTVATLRETYGEMADCCAKQEPERNECFLQHKDDN |
| | | | | PNLPRLVRPEVDVMCTAFHDNEETFLKKYLYEIARRHPYFYAPELLFFAKRYKAAFTECCQA |
| | | | | ADKAACLLPKLDELRDEGKASSAKQRLKCASLQKFGERAFKAWAVARLSQRFPKAEFAEVSK |
| | | | | LVTDLTKVHTECCHGDLLECADDRADLAKYICENQDSISSKLKECCEKPLLEKSHCIAEVEN |
| | | | | DEMPADLPSLAADFVESKDVCKNYAEAKDVFLGMFLYEYARRHPDYSVVLLLRLAKTYETTL |
| | | | | EKCCAAADPHECYAKVFDEFKPLVEEPQNLIKQNCELFEQLGEYKFQNALLVRYTKKVPQVS |
| | | | | TPTLVEVSRNLGKVGSKCCKHPEAKRMPCAEDYLSVVLNQLCVLHEKTPVSDRVTKCCTESL |
| | | | | VNRRPCFSALEVDETYVPKEFNAETFTFHADICTLSEKERQIKKQTALVELVKHKPKATKEQ |
| | | | | LKAVMDDFAAFVEKCCKADDKETCFAEEGKKLVAASQAALGLHHHHHH |
| 238 | EGF-5/[6] | DLL3-18 | bispecific | QVQLVESGGGAVQPGRSLRLSCAASGFTFSNYGMHWVRQAPGKGLEWVAVISHHGSSKYYAR |
| | | xI2C- | molecule - | SVKGRFTISRDNSKNTLYLEMNSLRAEDTAVYYCARDWWELVFDYWGQGTLVTVSSGGGGSG |
| | | HALB | HALB | GGGSGGGGSDIVMTQTPLSLSVTPGQPASISCKSSQSLLHSDGKTFLYWYLQKPGQPPQLLI |
| | | | | YEVSNRFSGVPDRFSGSGSGTDFTLKISRVEAEDVGVYYCLQGIHLPFTFGPGTKVEIKSGG |
| | | | | GGSEVQLVESGGGLVQPGGSLKLSCAASGFTFNKYAMNWVRQAPGKGLEWVARIRSKYNNYA |
| | | | | TYYADSVKDRFTISRDDSKNTAYLQMNNLKTEDTAVYYCVRHGNFGNSYISYWAYWGQGTLV |
| | | | | TVSSGGGGSGGGGSGGGGSQTVVTQEPSLTVSPGGTVTLTCGSSTGAVTSGNYPNWVQQKPG |
| | | | | QAPRGLIGGTKFLAPGTPARFSGSLLGGKAALTLSGVQPEDEAEYYCVLWYSNRWVFGGGTK |
| | | | | LTVLPGGGGSDAHKSEVAHRFKDLGEENFKALVLIAFAQYLQQCPFEDHVKLVNEVTEFAKT |
| | | | | CVADESAENCDKSLHTLFGDKLCTVATLRETYGEMADCCAKQEPERNECFLQHKDDNPNLPR |
| | | | | LVRPEVDVMCTAFHDNEETFLKKYLYEIARRHPYFYAPELLFFAKRYKAAFTECCQAADKAA |
| | | | | CLLPKLDELRDEGKASSAKQRLKCASLQKFGERAFKAWAVARLSQRFPKAEFAEVSKLVTDL |
| | | | | TKVHTECCHGDLLECADDRADLAKYICENQDSISSKLKECCEKPLLEKSHCIAEVENDEMPA |
| | | | | DLPSLAADFVESKDVCKNYAEAKDVFLGMFLYEYARRHPDYSVVLLLRLAKTYETTLEKCCA |
| | | | | AADPHECYAKVFDEFKPLVEEPQNLIKQNCELFEQLGEYKFQNALLVRYTKKVPQVSTPTLV |
| | | | | EVSRNLGKVGSKCCKHPEAKRMPCAEDYLSVVLNQLCVLHEKTPVSDRVTKCCTESLVNRRP |
| | | | | CFSALEVDETYVPKEFNAETFTFHADICTLSEKERQIKKQTALVELVKHKPKATKEQLKAVM |
| | | | | DDFAAFVEKCCKADDKETCFAEEGKKLVAASQAALGLHHHHHH |
| 239 | EGF-5/[6] | DLL3-19 | bispecific | QVTLKESGPMLVKPTETLTLTCTVSGFSLSNSRMGVSWIRQPPGRALEWLAHIFSNDGKSYS |
| | | xI2C- | molecule - | TSLKSRLTISKDTSKSQVVLTMTNMDPVDTATYYCARYNYDSSGYYYSFFDYWGQGTLVTVS |
| | | HALB | HALB | SGGGGSGGGGSGGGGSDIQMTQSPSSLSASVGDRVTITCRASQSISSYLNWYQQKPGKAPKL |
| | | | | LIYAASSLQSGVPSRFSGSGSGTDFTLTISSLQPEDFATYYCQQGYSSPFTFGGGTKVEIKS |
| | | | | GGGGSEVQLVESGGGLVQPGGSLKLSCAASGFTFNKYAMNWVRQAPGKGLEWVARIRSKYNN |
| | | | | YATYYADSVKDRFTISRDDSKNTAYLQMNNLKTEDTAVYYCVRHGNFGNSYISYWAYWGQGT |
| | | | | LVTVSSGGGGSGGGGSGGGGSQTVVTQEPSLTVSPGGTVTLTCGSSTGAVTSGNYPNWVQQK |
| | | | | PGQAPRGLIGGTKFLAPGTPARFSGSLLGGKAALTLSGVQPEDEAEYYCVLWYSNRWVFGGG |
| | | | | TKLTVLPGGGGSDAHKSEVAHRFKDLGEENFKALVLIAFAQYLQQCPFEDHVKLVNEVTEFA |
| | | | | KTCVADESAENCDKSLHTLFGDKLCTVATLRETYGEMADCCAKQEPERNECFLQHKDDNPNL |
| | | | | PRLVRPEVDVMCTAFHDNEETFLKKYLYEIARRHPYFYAPELLFFAKRYKAAFTECCQAADK |
| | | | | AACLLPKLDELRDEGKASSAKQRLKCASLQKFGERAFKAWAVARLSQRFPKAEFAEVSKLVT |
| | | | | DLTKVHTECCHGDLLECADDRADLAKYICENQDSISSKLKECCEKPLLEKSHCIAEVENDEM |
| | | | | PADLPSLAADFVESKDVCKNYAEAKDVFLGMFLYEYARRHPDYSVVLLLRLAKTYETTLEKC |
| | | | | CAAADPHECYAKVFDEFKPLVEEPQNLIKQNCELFEQLGEYKFQNALLVRYTKKVPQVSTPT |
| | | | | LVEVSRNLGKVGSKCCKHPEAKRMPCAEDYLSVVLNQLCVLHEKTPVSDRVTKCCTESLVNR |
| | | | | RPCFSALEVDETYVPKEFNAETFTFHADICTLSEKERQIKKQTALVELVKHKPKATKEQLKA |
| | | | | VMDDFAAFVEKCCKADDKETCFAEEGKKLVAASQAALGLHHHHHH |
| 240 | EGF-5/[6] | DLL3-20 | bispecific | QVTLKESGPVLVKPTETLTLTCTVSGFSLSNARMGVSWLRQPPGKALEWLAHIFSTDEKSYS |
| | | xI2C- | molecule - | TSLKSRLTISKDTSKSQVVLTMTNMDPVDTATYYCARYYYDSSGYYYSFFDYWGQGTLVTVS |
| | | HALB | HALB | SGGGGSGGGGSGGGGSDIQMTQSPSSLSASVGDRVTITCRASQSIRSYLNWYQQKPGKAPKL |
| | | | | LIYGASNLQSGVPSRFSGSGSGTDFTLTISSLQPEDFATYYCQQSYSSPFTFGGGTKVEIKS |
| | | | | GGGGSEVQLVESGGGLVQPGGSLKLSCAASGFTFNKYAMNWVRQAPGKGLEWVARIRSKYNN |
| | | | | YATYYADSVKDRFTISRDDSKNTAYLQMNNLKTEDTAVYYCVRHGNFGNSYISYWAYWGQGT |
| | | | | LVTVSSGGGGSGGGGSGGGGSQTVVTQEPSLTVSPGGTVTLTCGSSTGAVTSGNYPNWVQQK |
| | | | | PGQAPRGLIGGTKFLAPGTPARFSGSLLGGKAALTLSGVQPEDEAEYYCVLWYSNRWVFGGG |
| | | | | TKLTVLPGGGGSDAHKSEVAHRFKDLGEENFKALVLIAFAQYLQQCPFEDHVKLVNEVTEFA |
| | | | | KTCVADESAENCDKSLHTLFGDKLCTVATLRETYGEMADCCAKQEPERNECFLQHKDDNPNL |
| | | | | PRLVRPEVDVMCTAFHDNEETFLKKYLYEIARRHPYFYAPELLFFAKRYKAAFTECCQAADK |
| | | | | AACLLPKLDELRDEGKASSAKQRLKCASLQKFGERAFKAWAVARLSQRFPKAEFAEVSKLVT |
| | | | | DLTKVHTECCHGDLLECADDRADLAKYICENQDSISSKLKECCEKPLLEKSHCIAEVENDEM |
| | | | | PADLPSLAADFVESKDVCKNYAEAKDVFLGMFLYEYARRHPDYSVVLLLRLAKTYETTLEKC |
| | | | | CAAADPHECYAKVFDEFKPLVEEPQNLIKQNCELFEQLGEYKFQNALLVRYTKKVPQVSTPT |
| | | | | LVEVSRNLGKVGSKCCKHPEAKRMPCAEDYLSVVLNQLCVLHEKTPVSDRVTKCCTESLVNR |
| | | | | RPCFSALEVDETYVPKEFNAETFTFHADICTLSEKERQIKKQTALVELVKHKPKATKEQLKA |
| | | | | VMDDFAAFVEKCCKADDKETCFAEEGKKLVAASQAALGLHHHHHH |
| 241 | EGF-5/[6] | DLL3-21 | bispecific | QVQLVQSGAEVKKPGASVKVSCKASGYAFTSYYIHWVRQAPGQGLEWMGIINPSGGSKSYAQ |
| | | xI2C- | molecule - | KFRGRVTMTRDTSTSTVYMELSSLTSEDTAVYYCARSMSTVTSDAFDIWGQGTMVTVSSGGG |
| | | HALB | HALB | GSGGGGSGGGGSDIQMTQSPSSLSASVGDRVTITCRASQSISNYLNWYQQKPGKAPKLLIYA |
| | | | | ASSLQSGVPSRFSGSGSGTEFTLTISSLQPEDFATYYCQQSYSAPLTFGGGTKVDIKSGGGG |
| | | | | SEVQLVESGGGLVQPGGSLKLSCAASGFTFNKYAMNWVRQAPGKGLEWVARIRSKYNNYATY |
| | | | | YADSVKDRFTISRDDSKNTAYLQMNNLKTEDTAVYYCVRHGNFGNSYISYWAYWGQGTLVTV |
| | | | | SSGGGGSGGGGSGGGGSQTVVTQEPSLTVSPGGTVTLTCGSSTGAVTSGNYPNWVQQKPGQA |
| | | | | PRGLIGGTKFLAPGTPARFSGSLLGGKAALTLSGVQPEDEAEYYCVLWYSNRWVFGGGTKLT |
| | | | | VLPGGGGSDAHKSEVAHRFKDLGEENFKALVLIAFAQYLQQCPFEDHVKLVNEVTEFAKTCV |
| | | | | ADESAENCDKSLHTLFGDKLCTVATLRETYGEMADCCAKQEPERNECFLQHKDDNPNLPRLV |
| | | | | RPEVDVMCTAFHDNEETFLKKYLYEIARRHPYFYAPELLFFAKRYKAAFTECCQAADKAACL |
| | | | | LPKLDELRDEGKASSAKQRLKCASLQKFGERAFKAWAVARLSQRFPKAEFAEVSKLVTDLTK |
| | | | | VHTECCHGDLLECADDRADLAKYICENQDSISSKLKECCEKPLLEKSHCIAEVENDEMPADL |
| | | | | PSLAADFVESKDVCKNYAEAKDVFLGMFLYEYARRHPDYSVVLLLRLAKTYETTLEKCCAAA |
| | | | | DPHECYAKVFDEFKPLVEEPQNLIKQNCELFEQLGEYKFQNALLVRYTKKVPQVSTPTLVEV |
| | | | | SRNLGKVGSKCCKHPEAKRMPCAEDYLSVVLNQLCVLHEKTPVSDRVTKCCTESLVNRRPCF |
| | | | | SALEVDETYVPKEFNAETFTFHADICTLSEKERQIKKQTALVELVKHKPKATKEQLKAVMDD |
| | | | | FAAFVEKCCKADDKETCFAEEGKKLVAASQAALGLHHHHHH |
| 242 | EGF-3 | DLL3-4 | bispecific | QVQLQESGPGLVKPSETLSLTCTVSGGSISSYYWSWIRQPPGKGLEWIGYVYYSGTTNYNPS |
| | | xF12Q- | molecule - | LKSRVTISVDTSKNQFSLKLSSVTAADTAVYYCASIAVTGFYFDYWGQGTLVTVSSGGGGSG |
| | | HALB | HALB | GGGSGGGGSEIVLTQSPGTLSLSPGERVTLSCRASQRVNNNYLAWYQQRPGQAPRLLIYGAS |
| | | | | SRATGIPDRFSGSGSGTDFTLTISRLEPEDFAVYYCQQYDRSPLTFGGGTKLEIKSGGGGSE |
| | | | | VQLVESGGGLVQPGGSLRLSCAASGFTFNSYAMNWVRQAPGKGLEWVARIRSKYNNYATYYA |
| | | | | DSVKGRFTISRDDSKNTAYLQMNSLKTEDTAVYYCVRHGNFGNSYVSWWAYWGQGTLVTVSS |
| | | | | GGGGSGGGGSGGGGSQTVVTQEPSLTVSPGGTVTLTCGSSTGAVTSGNYPNWVQQKPGQAPR |
| | | | | GLIGGTKFLAPGTPARFSGSLLGGKAALTLSGVQPEDEAEYYCVLWYSNRWVFGGGTKLTVL |
| | | | | PGGGGSDAHKSEVAHRFKDLGEENFKALVLIAFAQYLQQCPFEDHVKLVNEVTEFAKTCVAD |
| | | | | ESAENCDKSLHTLFGDKLCTVATLRETYGEMADCCAKQEPERNECFLQHKDDNPNLPRLVRP |
| | | | | EVDVMCTAFHDNEETFLKKYLYEIARRHPYFYAPELLFFAKRYKAAFTECCQAADKAACLLP |
| | | | | KLDELRDEGKASSAKQRLKCASLQKFGERAFKAWAVARLSQRFPKAEFAEVSKLVTDLTKVH |
| | | | | TECCHGDLLECADDRADLAKYICENQDSISSKLKECCEKPLLEKSHCIAEVENDEMPADLPS |
| | | | | LAADFVESKDVCKNYAEAKDVFLGMFLYEYARRHPDYSVVLLLRLAKTYETTLEKCCAAADP |
| | | | | HECYAKVFDEFKPLVEEPQNLIKQNCELFEQLGEYKFQNALLVRYTKKVPQVSTPTLVEVSR |
| | | | | NLGKVGSKCCKHPEAKRMPCAEDYLSVVLNQLCVLHEKTPVSDRVTKCCTESLVNRRPCFSA |
| | | | | LEVDETYVPKEFNAETFTFHADICTLSEKERQIKKQTALVELVKHKPKATKEQLKAVMDDFA |
| | | | | AFVEKCCKADDKETCFAEEGKKLVAASQAALGLHHHHHH |
| 243 | EGF-3 | DLL3-5 | bispecific | QVQLQESGPGLVKPSETLSLTCTVSGGSISSYYWSWIRQPPGKGLEWIGYIYYSGRTNYYPS |
| | | xF12Q- | molecule - | LKSRVTISIDTSKNQFSLKLSSVTAADTAVYYCARIAVAGFFFDYWGQGTLVTVSSGGGGSG |
| | | HALB | HALB | GGGSGGGGSEIVLTQSPGTLSLSPGERATLSCRASQSVNKNYLAWYQQKPGQAPRLLIYGAS |
| | | | | SRATGIPDRFSGSGSGTDFTLTISRLEPEDFAVYYCQQYDRSPLTFGGGTKLEIKSGGGGSE |
| | | | | VQLVESGGGLVQPGGSLRLSCAASGFTFNSYAMNWVRQAPGKGLEWVARIRSKYNNYATYYA |
| | | | | DSVKGRFTISRDDSKNTAYLQMNSLKTEDTAVYYCVRHGNFGNSYVSWWAYWGQGTLVTVSS |
| | | | | GGGGSGGGGSGGGGSQTVVTQEPSLTVSPGGTVTLTCGSSTGAVTSGNYPNWVQQKPGQAPR |
| | | | | GLIGGTKFLAPGTPARFSGSLLGGKAALTLSGVQPEDEAEYYCVLWYSNRWVFGGGTKLTVL |
| | | | | PGGGGSDAHKSEVAHRFKDLGEENFKALVLIAFAQYLQQCPFEDHVKLVNEVTEFAKTCVAD |
| | | | | ESAENCDKSLHTLFGDKLCTVATLRETYGEMADCCAKQEPERNECFLQHKDDNPNLPRLVRP |
| | | | | EVDVMCTAFHDNEETFLKKYLYEIARRHPYFYAPELLFFAKRYKAAFTECCQAADKAACLLP |
| | | | | KLDELRDEGKASSAKQRLKCASLQKFGERAFKAWAVARLSQRFPKAEFAEVSKLVTDLTKVH |
| | | | | TECCHGDLLECADDRADLAKYICENQDSISSKLKECCEKPLLEKSHCIAEVENDEMPADLPS |
| | | | | LAADFVESKDVCKNYAEAKDVFLGMFLYEYARRHPDYSVVLLLRLAKTYETTLEKCCAAADP |
| | | | | HECYAKVFDEFKPLVEEPQNLIKQNCELFEQLGEYKFQNALLVRYTKKVPQVSTPTLVEVSR |
| | | | | NLGKVGSKCCKHPEAKRMPCAEDYLSVVLNQLCVLHEKTPVSDRVTKCCTESLVNRRPCFSA |
| | | | | LEVDETYVPKEFNAETFTFHADICTLSEKERQIKKQTALVELVKHKPKATKEQLKAVMDDFA |
| | | | | AFVEKCCKADDKETCFAEEGKKLVAASQAALGLHHHHHH |
| 244 | EGF-3 | DLL3-6 | bispecific | QVQLQESGPGLVKPSETLSLTCTVSGASISSFYWSWIRQPPGKGLEWIGYIYYSGTTNYNPS |
| | | xF12Q- | molecule - | LKSRVTISVDTSKNQFSLKLSSVTAADTAVYYCARIAVAGFFFDYWGQGTLVTVSSGGGGSG |
| | | HALB | HALB | GGGSGGGGSEIVLTQSPGTLSLSPGERATLSCRASQSVNKNYLAWYQQKPGQAPRLLIYGAS |
| | | | | SRATGIPDRFSGSGSGTDFTLTISRLEPEDFAVYYCQQYDRSPLTFGGGTKVEIKSGGGGSE |
| | | | | VQLVESGGGLVQPGGSLRLSCAASGFTFNSYAMNWVRQAPGKGLEWVARIRSKYNNYATYYA |
| | | | | DSVKGRFTISRDDSKNTAYLQMNSLKTEDTAVYYCVRHGNFGNSYVSWWAYWGQGTLVTVSS |
| | | | | GGGGSGGGGSGGGGSQTVVTQEPSLTVSPGGTVTLTCGSSTGAVTSGNYPNWVQQKPGQAPR |
| | | | | GLIGGTKFLAPGTPARFSGSLLGGKAALTLSGVQPEDEAEYYCVLWYSNRWVFGGGTKLTVL |
| | | | | PGGGGSDAHKSEVAHRFKDLGEENFKALVLIAFAQYLQQCPFEDHVKLVNEVTEFAKTCVAD |
| | | | | ESAENCDKSLHTLFGDKLCTVATLRETYGEMADCCAKQEPERNECFLQHKDDNPNLPRLVRP |
| | | | | EVDVMCTAFHDNEETFLKKYLYEIARRHPYFYAPELLFFAKRYKAAFTECCQAADKAACLLP |
| | | | | KLDELRDEGKASSAKQRLKCASLQKFGERAFKAWAVARLSQRFPKAEFAEVSKLVTDLTKVH |
| | | | | TECCHGDLLECADDRADLAKYICENQDSISSKLKECCEKPLLEKSHCIAEVENDEMPADLPS |
| | | | | LAADFVESKDVCKNYAEAKDVFLGMFLYEYARRHPDYSVVLLLRLAKTYETTLEKCCAAADP |
| | | | | HECYAKVFDEFKPLVEEPQNLIKQNCELFEQLGEYKFQNALLVRYTKKVPQVSTPTLVEVSR |
| | | | | NLGKVGSKCCKHPEAKRMPCAEDYLSVVLNQLCVLHEKTPVSDRVTKCCTESLVNRRPCFSA |
| | | | | LEVDETYVPKEFNAETFTFHADICTLSEKERQIKKQTALVELVKHKPKATKEQLKAVMDDFA |
| | | | | AFVEKCCKADDKETCFAEEGKKLVAASQAALGLHHHHHH |
| 245 | EGF-3 | DLL3-7 | bispecific | QVQLQESGPGLVKPSQTLSLTCTVSGASISSFYWSWIRQPPGKGLEWIGYIYYSGTTNYNPS |
| | | xF12Q- | molecule - | LKSRVTISVDTSKNQFSLKLSSVTAADTAVYYCARIAVAGFFFDYWGQGTLVTVSSGGGGSG |
| | | HALB | HALB | GGGSGGGGSEIVLTQSPGTLSLSPGERATLSCRASQSVNKNYLAWYQQKPGQAPRLLIYGAS |
| | | | | SRATGIPDRFSGSGSGTDFTLTISRLEPEDFAVYYCQQYDRSPLTFGGGTKVEIKSGGGGSE |
| | | | | VQLVESGGGLVQPGGSLRLSCAASGFTFNSYAMNWVRQAPGKGLEWVARIRSKYNNYATYYA |
| | | | | DSVKGRFTISRDDSKNTAYLQMNSLKTEDTAVYYCVRHGNFGNSYVSWWAYWGQGTLVTVSS |
| | | | | GGGGSGGGGSGGGGSQTVVTQEPSLTVSPGGTVTLTCGSSTGAVTSGNYPNWVQQKPGQAPR |
| | | | | GLIGGTKFLAPGTPARFSGSLLGGKAALTLSGVQPEDEAEYYCVLWYSNRWVFGGGTKLTVL |
| | | | | PGGGGSDAHKSEVAHRFKDLGEENFKALVLIAFAQYLQQCPFEDHVKLVNEVTEFAKTCVAD |
| | | | | ESAENCDKSLHTLFGDKLCTVATLRETYGEMADCCAKQEPERNECFLQHKDDNPNLPRLVRP |
| | | | | EVDVMCTAFHDNEETFLKKYLYEIARRHPYFYAPELLFFAKRYKAAFTECCQAADKAACLLP |
| | | | | KLDELRDEGKASSAKQRLKCASLQKFGERAFKAWAVARLSQRFPKAEFAEVSKLVTDLTKVH |
| | | | | TECCHGDLLECADDRADLAKYICENQDSISSKLKECCEKPLLEKSHCIAEVENDEMPADLPS |
| | | | | LAADFVESKDVCKNYAEAKDVFLGMFLYEYARRHPDYSVVLLLRLAKTYETTLEKCCAAADP |
| | | | | HECYAKVFDEFKPLVEEPQNLIKQNCELFEQLGEYKFQNALLVRYTKKVPQVSTPTLVEVSR |
| | | | | NLGKVGSKCCKHPEAKRMPCAEDYLSVVLNQLCVLHEKTPVSDRVTKCCTESLVNRRPCFSA |
| | | | | LEVDETYVPKEFNAETFTFHADICTLSEKERQIKKQTALVELVKHKPKATKEQLKAVMDDFA |
| | | | | AFVEKCCKADDKETCFAEEGKKLVAASQAALGLHHHHHH |
| 246 | EGF-3 | DLL3-8 | bispecific | QVQLQEWGPGLVKPSETLSLTCTVSGASISSFYWSWIRQPPGKGLEWIGYIYYSGTTNYNPS |
| | | xF12Q- | molecule - | LKSRVTISVDTSKNQLSLKLSSVTAADTAVYYCARIAVAGFFFDYWGQGTLVTVSSGGGGSG |
| | | HALB | HALB | GGGSGGGGSEIVLTQSPGTLSLSPGERATLSCRASQSVNKNYLAWYQQKPGQAPRLLIYGAS |
| | | | | SRATGIPDRFSGSGSGTDFTLTISRLEPEDFAVYYCQQYDRSPLTFGGGTKVDIKSGGGGSE |
| | | | | VQLVESGGGLVQPGGSLRLSCAASGFTFNSYAMNWVRQAPGKGLEWVARIRSKYNNYATYYA |
| | | | | DSVKGRFTISRDDSKNTAYLQMNSLKTEDTAVYYCVRHGNFGNSYVSWWAYWGQGTLVTVSS |
| | | | | GGGGSGGGGSGGGGSQTVVTQEPSLTVSPGGTVTLTCGSSTGAVTSGNYPNWVQQKPGQAPR |
| | | | | GLIGGTKFLAPGTPARFSGSLLGGKAALTLSGVQPEDEAEYYCVLWYSNRWVFGGGTKLTVL |
| | | | | PGGGGSDAHKSEVAHRFKDLGEENFKALVLIAFAQYLQQCPFEDHVKLVNEVTEFAKTCVAD |
| | | | | ESAENCDKSLHTLFGDKLCTVATLRETYGEMADCCAKQEPERNECFLQHKDDNPNLPRLVRP |
| | | | | EVDVMCTAFHDNEETFLKKYLYEIARRHPYFYAPELLFFAKRYKAAFTECCQAADKAACLLP |
| | | | | KLDELRDEGKASSAKQRLKCASLQKFGERAFKAWAVARLSQRFPKAEFAEVSKLVTDLTKVH |
| | | | | TECCHGDLLECADDRADLAKYICENQDSISSKLKECCEKPLLEKSHCIAEVENDEMPADLPS |
| | | | | LAADFVESKDVCKNYAEAKDVFLGMFLYEYARRHPDYSVVLLLRLAKTYETTLEKCCAAADP |
| | | | | HECYAKVFDEFKPLVEEPQNLIKQNCELFEQLGEYKFQNALLVRYTKKVPQVSTPTLVEVSR |
| | | | | NLGKVGSKCCKHPEAKRMPCAEDYLSVVLNQLCVLHEKTPVSDRVTKCCTESLVNRRPCFSA |
| | | | | LEVDETYVPKEFNAETFTFHADICTLSEKERQIKKQTALVELVKHKPKATKEQLKAVMDDFA |
| | | | | AFVEKCCKADDKETCFAEEGKKLVAASQAALGLHHHHHH |
| 247 | EGF-3 | DLL3-9 | bispecific | QVQLQESGPGLVKPSETLSLTCTVSGASISSFYWSWIRQPPGKGLEWIGYIYYSGTTNYNPS |
| | | xF12Q- | molecule - | LKSRVTISVDTSKNQFSLKLSSVTAADTAVYYCARIAVAGFFFDYWGQGTLVTVSSGGGGSG |
| | | HALB | HALB | GGGSGGGGSEIVLTQSPGTLSLSPGESATLSCRASQSVNKNYLAWYQQKPGQAPRLLIYGAS |
| | | | | SRATGIPDRFSGSGSGTDFTLTISRLEPEDFAVYYCQQYDRSPLTFGGGTRLEIKSGGGGSE |
| | | | | VQLVESGGGLVQPGGSLRLSCAASGFTFNSYAMNWVRQAPGKGLEWVARIRSKYNNYATYYA |
| | | | | DSVKGRFTISRDDSKNTAYLQMNSLKTEDTAVYYCVRHGNFGNSYVSWWAYWGQGTLVTVSS |
| | | | | GGGGSGGGGSGGGGSQTVVTQEPSLTVSPGGTVTLTCGSSTGAVTSGNYPNWVQQKPGQAPR |
| | | | | GLIGGTKFLAPGTPARFSGSLLGGKAALTLSGVQPEDEAEYYCVLWYSNRWVFGGGTKLTVL |
| | | | | PGGGGSDAHKSEVAHRFKDLGEENFKALVLIAFAQYLQQCPFEDHVKLVNEVTEFAKTCVAD |
| | | | | ESAENCDKSLHTLFGDKLCTVATLRETYGEMADCCAKQEPERNECFLQHKDDNPNLPRLVRP |
| | | | | EVDVMCTAFHDNEETFLKKYLYEIARRHPYFYAPELLFFAKRYKAAFTECCQAADKAACLLP |
| | | | | KLDELRDEGKASSAKQRLKCASLQKFGERAFKAWAVARLSQRFPKAEFAEVSKLVTDLTKVH |
| | | | | TECCHGDLLECADDRADLAKYICENQDSISSKLKECCEKPLLEKSHCIAEVENDEMPADLPS |
| | | | | LAADFVESKDVCKNYAEAKDVFLGMFLYEYARRHPDYSVVLLLRLAKTYETTLEKCCAAADP |
| | | | | HECYAKVFDEFKPLVEEPQNLIKQNCELFEQLGEYKFQNALLVRYTKKVPQVSTPTLVEVSR |
| | | | | NLGKVGSKCCKHPEAKRMPCAEDYLSVVLNQLCVLHEKTPVSDRVTKCCTESLVNRRPCFSA |
| | | | | LEVDETYVPKEFNAETFTFHADICTLSEKERQIKKQTALVELVKHKPKATKEQLKAVMDDFA |
| | | | | AFVEKCCKADDKETCFAEEGKKLVAASQAALGLHHHHHH |
| 248 | EGF-3 | DLL3-10 | bispecific | QVQLQESGPGLVKPSQTLSLTCTVSGGSISSYYWSWIRQPPGKGLEWIGYIFYNGITNYNPS |
| | | xF12Q- | molecule - | LKSRVTISLDTSKNQFSLKLSSVTAADTAKYYCARIHSGSFSFDYWDQGTLVTVSSGGGGSG |
| | | HALB | HALB | GGGSGGGGSEIVMTQSPGTLSLSPGERATLSCRASQSVSRGYLAWYQQKPGQAPRLLIYGAS |
| | | | | SRATDIPDRFSGSGSGTDFTLTISRLEPEDFAVYYCQQYDTSPITFGQGTKVEIKSGGGGSE |
| | | | | VQLVESGGGLVQPGGSLRLSCAASGFTFNSYAMNWVRQAPGKGLEWVARIRSKYNNYATYYA |
| | | | | DSVKGRFTISRDDSKNTAYLQMNSLKTEDTAVYYCVRHGNFGNSYVSWWAYWGQGTLVTVSS |
| | | | | GGGGSGGGGSGGGGSQTVVTQEPSLTVSPGGTVTLTCGSSTGAVTSGNYPNWVQQKPGQAPR |
| | | | | GLIGGTKFLAPGTPARFSGSLLGGKAALTLSGVQPEDEAEYYCVLWYSNRWVFGGGTKLTVL |
| | | | | PGGGGSDAHKSEVAHRFKDLGEENFKALVLIAFAQYLQQCPFEDHVKLVNEVTEFAKTCVAD |
| | | | | ESAENCDKSLHTLFGDKLCTVATLRETYGEMADCCAKQEPERNECFLQHKDDNPNLPRLVRP |
| | | | | EVDVMCTAFHDNEETFLKKYLYEIARRHPYFYAPELLFFAKRYKAAFTECCQAADKAACLLP |
| | | | | KLDELRDEGKASSAKQRLKCASLQKFGERAFKAWAVARLSQRFPKAEFAEVSKLVTDLTKVH |
| | | | | TECCHGDLLECADDRADLAKYICENQDSISSKLKECCEKPLLEKSHCIAEVENDEMPADLPS |
| | | | | LAADFVESKDVCKNYAEAKDVFLGMFLYEYARRHPDYSVVLLLRLAKTYETTLEKCCAAADP |
| | | | | HECYAKVFDEFKPLVEEPQNLIKQNCELFEQLGEYKFQNALLVRYTKKVPQVSTPTLVEVSR |
| | | | | NLGKVGSKCCKHPEAKRMPCAEDYLSVVLNQLCVLHEKTPVSDRVTKCCTESLVNRRPCFSA |
| | | | | LEVDETYVPKEFNAETFTFHADICTLSEKERQIKKQTALVELVKHKPKATKEQLKAVMDDFA |
| | | | | AFVEKCCKADDKETCFAEEGKKLVAASQAALGLHHHHHH |
| 249 | EGF-4 | DLL3-13 | bispecific | QVQLVQSGAEVKKPGASVKVSCKASGYTFTSYYMHWVRQAPGQGLEWMGIINPSDGSTNYAQ |
| | | xF12Q- | molecule - | NFQGRVTMTRDTSTNTVYMELSSLRSEDTAVYYCARGGNSAFYSYYDMDVWGQGTTVTVSSG |
| | | HALB | HALB | GGGSGGGGSGGGGSDVVMTQSPLSLPVTLGQPASISCRSSQSLVYRDGNTYLSWFQQRPGQS |
| | | | | PRRLIYKVSNWQSGVPDRFSGSGSGTDFTLKISRVEAEDVGVYFCMQGTHWPPTFGQGTKVE |
| | | | | IKSGGGGSEVQLVESGGGLVQPGGSLRLSCAASGFTFNSYAMNWVRQAPGKGLEWVARIRSK |
| | | | | YNNYATYYADSVKGRFTISRDDSKNTAYLQMNSLKTEDTAVYYCVRHGNFGNSYVSWWAYWG |
| | | | | QGTLVTVSSGGGGSGGGGSGGGGSQTVVTQEPSLTVSPGGTVTLTCGSSTGAVTSGNYPNWV |
| | | | | QQKPGQAPRGLIGGTKFLAPGTPARFSGSLLGGKAALTLSGVQPEDEAEYYCVLWYSNRWVF |
| | | | | GGGTKLTVLPGGGGSDAHKSEVAHRFKDLGEENFKALVLIAFAQYLQQCPFEDHVKLVNEVT |
| | | | | EFAKTCVADESAENCDKSLHTLFGDKLCTVATLRETYGEMADCCAKQEPERNECFLQHKDDN |
| | | | | PNLPRLVRPEVDVMCTAFHDNEETFLKKYLYEIARRHPYFYAPELLFFAKRYKAAFTECCQA |
| | | | | ADKAACLLPKLDELRDEGKASSAKQRLKCASLQKFGERAFKAWAVARLSQRFPKAEFAEVSK |
| | | | | LVTDLTKVHTECCHGDLLECADDRADLAKYICENQDSISSKLKECCEKPLLEKSHCIAEVEN |
| | | | | DEMPADLPSLAADFVESKDVCKNYAEAKDVFLGMFLYEYARRHPDYSVVLLLRLAKTYETTL |
| | | | | EKCCAAADPHECYAKVFDEFKPLVEEPQNLIKQNCELFEQLGEYKFQNALLVRYTKKVPQVS |
| | | | | TPTLVEVSRNLGKVGSKCCKHPEAKRMPCAEDYLSVVLNQLCVLHEKTPVSDRVTKCCTESL |
| | | | | VNRRPCFSALEVDETYVPKEFNAETFTFHADICTLSEKERQIKKQTALVELVKHKPKATKEQ |
| | | | | LKAVMDDFAAFVEKCCKADDKETCFAEEGKKLVAASQAALGLHHHHHH |
| 250 | EGF-4 | DLL3-14 | bispecific | QVQLVQSGAEVKKPGASVKVSCKASGYTFTNYYMHWVRQAPGLGLEWMGIINPSDGSTSYAQ |
| | | xF12Q- | molecule - | KFQGRVTMTRDTSTNTVYMDLSSLRSEDTAVYYCARGGNSAFYSYYDMDVWGQGTTVTVSSG |
| | | HALB | HALB | GGGSGGGGSGGGGSDVVMTQTPLSLPVTLGQPASISCRSSQSLVYRDGNTYLSWFQQRPGQS |
| | | | | PRRLIYKVSNWQSGVPDRFSGGGSGTDFTLKISRVEAEDVGVYYCMQGTHWPPTFGQGTKVE |
| | | | | IKSGGGGSEVQLVESGGGLVQPGGSLRLSCAASGFTFNSYAMNWVRQAPGKGLEWVARIRSK |
| | | | | YNNYATYYADSVKGRFTISRDDSKNTAYLQMNSLKTEDTAVYYCVRHGNFGNSYVSWWAYWG |
| | | | | QGTLVTVSSGGGGSGGGGSGGGGSQTVVTQEPSLTVSPGGTVTLTCGSSTGAVTSGNYPNWV |
| | | | | QQKPGQAPRGLIGGTKFLAPGTPARFSGSLLGGKAALTLSGVQPEDEAEYYCVLWYSNRWVF |
| | | | | GGGTKLTVLPGGGGSDAHKSEVAHRFKDLGEENFKALVLIAFAQYLQQCPFEDHVKLVNEVT |
| | | | | EFAKTCVADESAENCDKSLHTLFGDKLCTVATLRETYGEMADCCAKQEPERNECFLQHKDDN |
| | | | | PNLPRLVRPEVDVMCTAFHDNEETFLKKYLYEIARRHPYFYAPELLFFAKRYKAAFTECCQA |
| | | | | ADKAACLLPKLDELRDEGKASSAKQRLKCASLQKFGERAFKAWAVARLSQRFPKAEFAEVSK |
| | | | | LVTDLTKVHTECCHGDLLECADDRADLAKYICENQDSISSKLKECCEKPLLEKSHCIAEVEN |
| | | | | DEMPADLPSLAADFVESKDVCKNYAEAKDVFLGMFLYEYARRHPDYSVVLLLRLAKTYETTL |
| | | | | EKCCAAADPHECYAKVFDEFKPLVEEPQNLIKQNCELFEQLGEYKFQNALLVRYTKKVPQVS |
| | | | | TPTLVEVSRNLGKVGSKCCKHPEAKRMPCAEDYLSVVLNQLCVLHEKTPVSDRVTKCCTESL |
| | | | | VNRRPCFSALEVDETYVPKEFNAETFTFHADICTLSEKERQIKKQTALVELVKHKPKATKEQ |
| | | | | LKAVMDDFAAFVEKCCKADDKETCFAEEGKKLVAASQAALGLHHHHHH |
| 251 | EGF-4 | DLL3-15 | bispecific | QVQLVQSGAEVKKPGASVKVSCKASGYTFTGYYIHWVRQAPGQGLEWMGIINPSDGSTSYGQ |
| | | xF12Q- | molecule - | NFQGRVTMTRDTSTNTVYMELSSLRSEDTAVYYCARGGNSAFYSYYDMDVWGQGTTVTVSSG |
| | | HALB | HALB | GGGSGGGGSGGGGSDVVMTQSPLSLPVTLGQPASISCRSSQSLAYRDGNTYLSWFQQRPGQS |
| | | | | PRRLIYKVSNWQSGVPDRFSGSGSGTDFTLKISRVEAEDVGVYFCMQGTHWPPTFGQGTKVE |
| | | | | IKSGGGGSEVQLVESGGGLVQPGGSLRLSCAASGFTFNSYAMNWVRQAPGKGLEWVARIRSK |
| | | | | YNNYATYYADSVKGRFTISRDDSKNTAYLQMNSLKTEDTAVYYCVRHGNFGNSYVSWWAYWG |
| | | | | QGTLVTVSSGGGGSGGGGSGGGGSQTVVTQEPSLTVSPGGTVTLTCGSSTGAVTSGNYPNWV |
| | | | | QQKPGQAPRGLIGGTKFLAPGTPARFSGSLLGGKAALTLSGVQPEDEAEYYCVLWYSNRWVF |
| | | | | GGGTKLTVLPGGGGSDAHKSEVAHRFKDLGEENFKALVLIAFAQYLQQCPFEDHVKLVNEVT |
| | | | | EFAKTCVADESAENCDKSLHTLFGDKLCTVATLRETYGEMADCCAKQEPERNECFLQHKDDN |
| | | | | PNLPRLVRPEVDVMCTAFHDNEETFLKKYLYEIARRHPYFYAPELLFFAKRYKAAFTECCQA |
| | | | | ADKAACLLPKLDELRDEGKASSAKQRLKCASLQKFGERAFKAWAVARLSQRFPKAEFAEVSK |
| | | | | LVTDLTKVHTECCHGDLLECADDRADLAKYICENQDSISSKLKECCEKPLLEKSHCIAEVEN |
| | | | | DEMPADLPSLAADFVESKDVCKNYAEAKDVFLGMFLYEYARRHPDYSVVLLLRLAKTYETTL |
| | | | | EKCCAAADPHECYAKVFDEFKPLVEEPQNLIKQNCELFEQLGEYKFQNALLVRYTKKVPQVS |
| | | | | TPTLVEVSRNLGKVGSKCCKHPEAKRMPCAEDYLSVVLNQLCVLHEKTPVSDRVTKCCTESL |
| | | | | VNRRPCFSALEVDETYVPKEFNAETFTFHADICTLSEKERQIKKQTALVELVKHKPKATKEQ |
| | | | | LKAVMDDFAAFVEKCCKADDKETCFAEEGKKLVAASQAALGLHHHHHH |
| 252 | — | Human | human | MVSPRMSGLLSQTVILALIFLPQTRPAGVFELQIHSFGPGPGPGAPRSPCSARLPCRLFFRV |
| | | DLL3 | | CLKPGLSEEAAESPCALGAALSARGPVYTEQPGAPAPDLPLPDGLLQVPFRDAWPGTFSFII |
| | | | | ETWREELGDQIGGPAWSLLARVAGRRRLAAGGPWARDIQRAGAWELRFSYRARCEPPAVGTA |
| | | | | CTRLCRPRSAPSRCGPGLRPCAPLEDECEAPLVCRAGCSPEHGFCEQPGECRCLEGWTGPLC |
| | | | | TVPVSTSSCLSPRGPSSATTGCLVPGPGPCDGNPCANGGSCSETPRSFECTCPRGFYGLRCE |
| | | | | VSGVTCADGPCFNGGLCVGGADPDSAYICHCPPGFQGSNCEKRVDRCSLQPCRNGGLCLDLG |
| | | | | HALRCRCRAGFAGPRCEHDLDDCAGRACANGGTCVEGGGAHRCSCALGFGGRDCRERADPCA |
| | | | | ARPCAHGGRCYAHFSGLVCACAPGYMGARCEFPVHPDGASALPAAPPGLRPGDPQRYLLPPA |
| | | | | LGLLVAAGVAGAALLLVHVRRRGHSQDAGSRLLAGTPEPSVHALPDALNNLRTQEGSGDGPS |
| | | | | SSVDWNRPEDVDPQGIYVISAPSIYAREVATPLFPPLHTGRAGQRQHLLFPYPSSILSVK |
| 253 | — | Human | human | MVSPRMSGLLSQTVILALIFLPQTRPAGVFELQIHSFGPGPGPGAPRSPCSARLPCRLFFRV |
| | | DLL3 | | CLKPGLSEEAAESPCALGAALSARGPVYTEQPGAPAPDLPLPDGLLQVPFRDAWPGTFSFII |
| | | ECD | | ETWREELGDQIGGPAWSLLARVAGRRRLAAGGPWARDIQRAGAWELRFSYRARCEPPAVGTA |
| | | | | CTRLCRPRSAPSRCGPGLRPCAPLEDECEAPLVCRAGCSPEHGFCEQPGECRCLEGWTGPLC |
| | | | | TVPVSTSSCLSPRGPSSATTGCLVPGPGPCDGNPCANGGSCSETPRSFECTCPRGFYGLRCE |
| | | | | VSGVTCADGPCFNGGLCVGGADPDSAYICHCPPGFQGSNCEKRVDRCSLQPCRNGGLCLDLG |
| | | | | HALRCRCRAGFAGPRCEHDLDDCAGRACANGGTCVEGGGAHRCSCALGFGGRDCRERADPCA |
| | | | | ARPCAHGGRCYAHFSGLVCACAPGYMGARCEFPVHPDGASALPAAPPGLRPGDPQRYL |
| 254 | — | Hu DLL3 | human | MVSPRMSGLLSQTVILALIFLPQTRPAGVFELQIHSFGPGPGPGAPRSPCSARLPCRLFFRV |
| | | N-term. | | CLKPGLSEEAAESPCALGAALSARGPVYTEQPGAPAPDLPLPDGLLQVPFRDAWPGTFSFII |
| | | | | ETWREELGDQIGGPAWSLLARVAGRRRLAAGGPWARDIQRAGAWELRFSYR |
| 255 | — | Hu DLL3 | human | ARCEPPAVGTACTRLCRPRSAPSRCGPGLRPCAPLEDECE |
| | | DSL dom | | |
| 256 | — | Hu DLL3 | human | APLVCRAGCSPEHGFCEQPGECRCLEGWTGPLCT |
| | | EGF-1 | | |
| 257 | — | Hu DLL3 | human | GPGPCDGNPCANGGSCSETPRSFECTCPRGFYGLRCE |
| | | EGF-2 | | |
| 258 | — | Hu DLL3 | human | SGVTCADGPCFNGGLCVGGADPDSAYICHCPPGFQGSNCE |
| | | EGF-3 | | |
| 259 | — | Hu DLL3 | human | RVDRCSLQPCRNGGLCLDLGHALRCRCRAGFAGPRCE |
| | | EGF-4 | | |
| 260 | — | Hu DLL3 | human | SGVTCADGPCFNGGLCVGGADPDSAYICHCPPGFQGSNCEKRVDRCSLQPCRNGGLCLDLGH |
| | | EGF-3 + 4 | | ALRCRCRAGFAGPRCE |
| 261 | — | Hu DLL3 | human | DLDDCAGRACANGGTCVEGGGAHRCSCALGFGGRDCR |
| | | EGF-5 | | |
| 262 | — | Hu DLL3 | human | RADPCAARPCAHGGRCYAHFSGLVCACAPGYMGARCE |
| | | EGF-6 | | |
| 263 | — | Human | artificial | MVSPRMSGLLSQTVILALIFLPQTRPAGVFELQIHSFGPGPGPGAPRSPCSARLPCRLFFRV |
| | | DLL3 | | CLKPGLSEEAAESPCALGAALSARGPVYTEQPGAPAPDLPLPDGLLQVPFRDAWPGTFSFII |
| | | ECD × | | ETWREELGDQIGGPAWSLLARVAGRRRLAAGGPWARDIQRAGAWELRFSYRARCEPPAVGTA |
| | | EpCAM | | CTRLCRPRSAPSRCGPGLRPCAPLEDECEAPLVCRAGCSPEHGFCEQPGECRCLEGWTGPLC |
| | | | | TVPVSTSSCLSPRGPSSATTGCLVPGPGPCDGNPCANGGSCSETPRSFECTCPRGFYGLRCE |
| | | | | VSGVTCADGPCFNGGLCVGGADPDSAYICHCPPGFQGSNCEKRVDRCSLQPCRNGGLCLDLG |
| | | | | HALRCRCRAGFAGPRCEHDLDDCAGRACANGGTCVEGGGAHRCSCALGFGGRDCRERADPCA |
| | | | | ARPCAHGGRCYAHFSGLVCACAPGYMGARCEFPVHPDGASALPAAPPGLRPGDPQRYLSGGG |
| | | | | GSGAGVIAVIVVVVIAIVAGIVVLVISRKKRMAKYEKAEIKEMGEMHRELNA |
| 264 | — | V5 × hu | artificial | MGWSCIILFLVATATGVHSGKPIPNPLLGLDSTSGARCEPPAVGTACTRLCRPRSAPSRCGP |
| | | DLL3 - | | GLRPCAPLEDECEAPLVCRAGCSPEHGFCEQPGECRCLEGWTGPLCTVPVSTSSCLSPRGPS |
| | | DSL × | | SATTGCLVPGPGPCDGNPCANGGSCSETPRSFECTCPRGFYGLRCEVSGVTCADGPCFNGGL |
| | | EpCAM | | CVGGADPDSAYICHCPPGFQGSNCEKRVDRCSLQPCRNGGLCLDLGHALRCRCRAGFAGPRC |
| | | | | EHDLDDCAGRACANGGTCVEGGGAHRCSCALGFGGRDCRERADPCAARPCAHGGRCYAHFSG |
| | | | | LVCACAPGYMGARCEFPVHPDGASALPAAPPGLRPGDPQRYLSGGGGSGAGVIAVIVVVVIA |
| | | | | IVAGIVVLVISRKKRMAKYEKAEIKEMGEMHRELNA |
| 265 | — | V5 × hu | artificial | MGWSCIILFLVATATGVHSGKPIPNPLLGLDSTSGAPLVCRAGCSPEHGFCEQPGECRCLEG |
| | | DLL3- | | WTGPLCTVPVSTSSCLSPRGPSSATTGCLVPGPGPCDGNPCANGGSCSETPRSFECTCPRGF |
| | | EGF1 × | | YGLRCEVSGVTCADGPCFNGGLCVGGADPDSAYICHCPPGFQGSNCEKRVDRCSLQPCRNGG |
| | | EpCAM | | LCLDLGHALRCRCRAGFAGPRCEHDLDDCAGRACANGGTCVEGGGAHRCSCALGFGGRDCRE |
| | | | | RADPCAARPCAHGGRCYAHFSGLVCACAPGYMGARCEFPVHPDGASALPAAPPGLRPGDPQR |
| | | | | YLSGGGGSGAGVIAVIVVVVIAIVAGIVVLVISRKKRMAKYEKAEIKEMGEMHRELNA |
| 266 | — | V5 × hu | artificial | MGWSCIILFLVATATGVHSGKPIPNPLLGLDSTSGGPGPCDGNPCANGGSCSETPRSFECTC |
| | | DLL3- | | PRGFYGLRCEVSGVTCADGPCFNGGLCVGGADPDSAYICHCPPGFQGSNCEKRVDRCSLQPC |
| | | EGF2 × | | RNGGLCLDLGHALRCRCRAGFAGPRCEHDLDDCAGRACANGGTCVEGGGAHRCSCALGFGGR |
| | | EpCAM | | DCRERADPCAARPCAHGGRCYAHFSGLVCACAPGYMGARCEFPVHPDGASALPAAPPGLRPG |
| | | | | DPQRYLSGGGGSGAGVIAVIVVVVIAIVAGIVVLVISRKKRMAKYEKAEIKEMGEMHRELNA |
| 267 | — | V5 × hu | artificial | MGWSCIILFLVATATGVHSGKPIPNPLLGLDSTSGSGVTCADGPCFNGGLCVGGADPDSAYI |
| | | DLL3 - | | CHCPPGFQGSNCEKRVDRCSLQPCRNGGLCLDLGHALRCRCRAGFAGPRCEHDLDDCAGRAC |
| | | EGF3 × | | ANGGTCVEGGGAHRCSCALGFGGRDCRERADPCAARPCAHGGRCYAHFSGLVCACAPGYMGA |
| | | EpCAM | | RCEFPVHPDGASALPAAPPGLRPGDPQRYLSGGGGSGAGVIAVIVVVVIAIVAGIVVLVISR |
| | | | | KKRMAKYEKAEIKEMGEMHRELNA |
| 268 | — | V5 × hu | artificial | MGWSCIILFLVATATGVHSGKPIPNPLLGLDSTSGRVDRCSLQPCRNGGLCLDLGHALRCRC |
| | | DLL3- | | RAGFAGPRCEHDLDDCAGRACANGGTCVEGGGAHRCSCALGFGGRDCRERADPCAARPCAHG |
| | | EGF4 × | | GRCYAHFSGLVCACAPGYMGARCEFPVHPDGASALPAAPPGLRPGDPQRYLSGGGGSGAGVI |
| | | EpCAM | | AVIVVVVIAIVAGIVVLVISRKKRMAKYEKAEIKEMGEMHRELNA |
| 269 | — | V5 × hu | artificial | MGWSCIILFLVATATGVHSGKPIPNPLLGLDSTSGDLDDCAGRACANGGTCVEGGGAHRCSC |
| | | DLL3- | | ALGFGGRDCRERADPCAARPCAHGGRCYAHFSGLVCACAPGYMGARCEFPVHPDGASALPAA |
| | | EGF5 × | | PPGLRPGDPQRYLSGGGGSGAGVIAVIVVVVIAIVAGIVVLVISRKKRMAKYEKAEIKEMGE |
| | | EpCAM | | MHRELNA |
| 270 | — | V5 × hu | artificial | MGWSCIILFLVATATGVHSGKPIPNPLLGLDSTSGRADPCAARPCAHGGRCYAHFSGLVCAC |
| | | DLL3- | | APGYMGARCEFPVHPDGASALPAAPPGLRPGDPQRYLSGGGGSGAGVIAVIVVVVIAIVAGI |
| | | EGF6 × | | VVLVISRKKRMAKYEKAEIKEMGEMHRELNA |
| | | EpCAM | | |
| 271 | — | Macaque | cyno | MVSPRMSRLLSQTVILALIFIPQARPAGVFELQIHSFGPGPGPGAPRSPCSARGPCRLFFRV |
| | | DLL3 | | CLKPGLSEEAAESPCALGAALSARGPVYTEQPEAPAPDLPLPNGLLQVPFRDAWPGTFSLII |
| | | | | ETWREELGDQIGGPAWSLLARVTRRRRLAAGGPWARDIQRAGAWELRFSYRARCELPAVGTA |
| | | | | CTRLCRPRSAPSRCGPGLRPCAPLEDECEAPPVCRAGCSLEHGFCEQPGECRCLEGWTGPLC |
| | | | | MVPASTSSCLGLRGPSSATTGCLVPGPGPCDGNPCANGGSCSETPGSFECTCPRGFYGLRCE |
| | | | | VSGVTCADGPCFNGGLCVGGADPDSAYICHCPPGFQGSNCEKRVDRCSLQPCRNGGLCLDLG |
| | | | | HALRCRCRAGFAGPRCEHNLDDCAGRACANGGTCVEGGGAHRCSCALGFGGRDCRERADPCA |
| | | | | ARPCAHGGRCYAHFSGLVCACAPGYMGSRCEFPVHPDGVSALPAAPPGLRPGDPQRYLLPPA |
| | | | | LGLLVAAGVAGAALLLVHVRRRGHAQDAGSRLLAGTPEPSVHALPDALNNQRTQEGPGDVPS |
| | | | | SSVDWNRPEDVDSRGIYVISAPSIYAREA |
| 272 | — | Macaque | cyno | MVSPRMSRLLSQTVILALIFIPQARPAGVFELQIHSFGPGPGPGAPRSPCSARGPCRLFFRV |
| | | DLL3 | | CLKPGLSEEAAESPCALGAALSARGPVYTEQPEAPAPDLPLPNGLLQVPFRDAWPGTFSLII |
| | | ECD | | ETWREELGDQIGGPAWSLLARVTRRRRLAAGGPWARDIQRAGAWELRFSYRARCELPAVGTA |
| | | | | CTRLCRPRSAPSRCGPGLRPCAPLEDECEAPPVCRAGCSLEHGFCEQPGECRCLEGWTGPLC |
| | | | | MVPASTSSCLGLRGPSSATTGCLVPGPGPCDGNPCANGGSCSETPGSFECTCPRGFYGLRCE |
| | | | | VSGVTCADGPCFNGGLCVGGADPDSAYICHCPPGFQGSNCEKRVDRCSLQPCRNGGLCLDLG |
| | | | | HALRCRCRAGFAGPRCEHNLDDCAGRACANGGTCVEGGGAHRCSCALGFGGRDCRERADPCA |
| | | | | ARPCAHGGRCYAHFSGLVCACAPGYMGSRCEFPVHPDGVSALPAAPPGLRPGDPQRYL |
| 273 | — | Ma DLL3 | cyno | MVSPRMSRLLSQTVILALIFIPQARPAGVFELQIHSFGPGPGPGAPRSPCSARGPCRLFFRV |
| | | N-term. | | CLKPGLSEEAAESPCALGAALSARGPVYTEQPEAPAPDLPLPNGLLQVPFRDAWPGTFSLII |
| | | | | ETWREELGDQIGGPAWSLLARVTRRRRLAAGGPWARDIQRAGAWELRFSYR |
| 274 | — | Ma DLL3 | cyno | ARCELPAVGTACTRLCRPRSAPSRCGPGLRPCAPLEDECE |
| | | DSL dom. | | |
| 275 | — | Ma DLL3 | cyno | APPVCRAGCSLEHGFCEQPGECRCLEGWTGPLCM |
| | | EGF-1 | | |
| 276 | — | Ma DLL3 | cyno | GPGPCDGNPCANGGSCSETPGSFECTCPRGFYGLRCE |
| | | EGF-2 | | |
| 277 | — | Ma DLL3 | cyno | SGVTCADGPCFNGGLCVGGADPDSAYICHCPPGFQGSNCE |
| | | EGF-3 | | |
| 278 | — | Ma DLL3 | cyno | RVDRCSLQPCRNGGLCLDLGHALRCRCRAGFAGPRCE |
| | | EGF-4 | | |
| 279 | — | Ma DLL3 | cyno | SGVTCADGPCFNGGLCVGGADPDSAYICHCPPGFQGSNCEKRVDRCSLQPCRNGGLCLDLGH |
| | | EGF-3 + 4 | | ALRCRCRAGFAGPRCE |
| 280 | — | Ma DLL3 | cyno | NLDDCAGRACANGGTCVEGGGAHRCSCALGFGGRDCR |
| | | EGF-5 | | |
| 281 | — | Ma DLL3 | cyno | RADPCAARPCAHGGRCYAHFSGLVCACAPGYMGSRCE |
| | | EGF-6 | | |
| 282 | — | Ma DLL3 | artificial | MVSPRMSRLLSQTVILALIFIPQARPAGVFELQIHSFGPGPGPGAPRSPCSARGPCRLFFRV |
| | | ECD × | | CLKPGLSEEAAESPCALGAALSARGPVYTEQPEAPAPDLPLPNGLLQVPFRDAWPGTFSLII |
| | | EpCAM | | ETWREELGDQIGGPAWSLLARVTRRRRLAAGGPWARDIQRAGAWELRFSYRARCELPAVGTA |
| | | | | CTRLCRPRSAPSRCGPGLRPCAPLEDECEAPPVCRAGCSLEHGFCEQPGECRCLEGWTGPLC |
| | | | | MVPASTSSCLGLRGPSSATTGCLVPGPGPCDGNPCANGGSCSETPGSFECTCPRGFYGLRCE |
| | | | | VSGVTCADGPCFNGGLCVGGADPDSAYICHCPPGFQGSNCEKRVDRCSLQPCRNGGLCLDLG |
| | | | | HALRCRCRAGFAGPRCEHNLDDCAGRACANGGTCVEGGGAHRCSCALGFGGRDCRERADPCA |
| | | | | ARPCAHGGRCYAHFSGLVCACAPGYMGSRCEFPVHPDGVSALPAAPPGLRPGDPQRYLSGGG |
| | | | | GSGAGVIAVIVVVVIAIVAGIVVLVISRKKRMAKYEKAEIKEMGEMHRELNA |
| 283 | — | Human | human | MGSRCALALAVLSALLCQVWSSGVFELKLQEFVNKKGLLGNRNCCRGGAGPPPCACRTFFRV |
| | | DLL1 | | CLKHYQASVSPEPPCTYGSAVTPVLGVDSFSLPDGGGADSAFSNPIRFPFGFTWPGTFSLII |
| | | | | EALHTDSPDDLATENPERLISRLATQRHLTVGEEWSQDLHSSGRTDLKYSYRFVCDEHYYGE |
| | | | | GCSVFCRPRDDAFGHFTCGERGEKVCNPGWKGPYCTEPICLPGCDEQHGFCDKPGECKCRVG |
| | | | | WQGRYCDECIRYPGCLHGTCQQPWQCNCQEGWGGLFCNQDLNYCTHHKPCKNGATCTNTGQG |
| | | | | SYTCSCRPGYTGATCELGIDECDPSPCKNGGSCTDLENSYSCTCPPGFYGKICELSAMTCAD |
| | | | | GPCFNGGRCSDSPDGGYSCRCPVGYSGFNCEKKIDYCSSSPCSNGAKCVDLGDAYLCRCQAG |
| | | | | FSGRHCDDNVDDCASSPCANGGTCRDGVNDFSCTCPPGYTGRNCSAPVSRCEHAPCHNGATC |
| | | | | HERGHRYVCECARGYGGPNCQFLLPELPPGPAVVDLTEKLEGQGGPFPWVAVCAGVILVLML |
| | | | | LLGCAAVVVCVRLRLQKHRPPADPCRGETETMNNLANCQREKDISVSIIGATQIKNTNKKAD |
| | | | | FHGDHSADKNGFKARYPAVDYNLVQDLKGDDTAVRDAHSKRDTKCQPQGSSGEEKGTPTTLR |
| | | | | GGEASERKRPDSGCSTSKDTKYQSVYVISEEKDECVIATEV |
| 284 | — | Human | human | MAAASRSASGWALLLLVALWQQRAAGSGVFQLQLQEFINERGVLASGRPCEPGCRTFFRVCL |
| | | DLL4 | | KHFQAVVSPGPCTFGTVSTPVLGTNSFAVRDDSSGGGRNPLQLPFNFTWPGTFSLIIEAWHA |
| | | | | PGDDLRPEALPPDALISKIAIQGSLAVGQNWLLDEQTSTLTRLRYSYRVICSDNYYGDNCSR |
| | | | | LCKKRNDHFGHYVCQPDGNLSCLPGWTGEYCQQPICLSGCHEQNGYCSKPAECLCRPGWQGR |
| | | | | LCNECIPHNGCRHGTCSTPWQCTCDEGWGGLFCDQDLNYCTHHSPCKNGATCSNSGQRSYTC |
| | | | | TCRPGYTGVDCELELSECDSNPCRNGGSCKDQEDGYHCLCPPGYYGLHCEHSTLSCADSPCF |
| | | | | NGGSCRERNQGANYACECPPNFTGSNCEKKVDRCTSNPCANGGQCLNRGPSRMCRCRPGFTG |
| | | | | TYCELHVSDCARNPCAHGGTCHDLENGLMCTCPAGFSGRRCEVRTSIDACASSPCFNRATCY |
| | | | | TDLSTDTFVCNCPYGFVGSRCEFPVGLPPSFPWVAVSLGVGLAVLLVLLGMVAVAVRQLRLR |
| | | | | RPDDGSREAMNNLSDFQKDNLIPAAQLKNTNQKKELEVDCGLDKSNCGKQQNHTLDYNLAPG |
| | | | | PLGRGTMPGKFPHSDKSLGEKAPLRLHSEKPECRISAICSPRDSMYQSVCLISEERNECVIA |
| | | | | TEV |
| 285 | — | linker 1 | artificial | GGGG |
| 286 | — | linker 2 | artificial | GGGGS |
| 287 | — | linker 3 | artificial | GGGGQ |
| 288 | — | linker 4 | artificial | SGGGGS |
| 289 | — | linker 5 | artificial | PGGGGS |
| 290 | — | linker 6 | artificial | PGGDGS |
| 291 | — | linker 7 | artificial | GGGGSGGGS |
| 292 | — | linker 8 | artificial | GGGGSGGGGS |
| 293 | | linker 9 | artificial | GGGGSGGGGSGGGGS |
| 294 | — | Hexa-his | artificial | HHHHHH |
| 295 | — | Ab156 | artificial | RDWDFDVFGGGTPVGG |
| 296 | — | linear | artificial | QRFVTGHFGGLXPANG |
| | | FcRn BP | | |
| 297 | — | linear | artificial | QRFVTGHFGGLYPANG |
| | | FcRn BP- | | |
| | | Y | | |
| 298 | — | linear | artificial | QRFVTGHFGGLHPANG |
| | | FcRn BP- | | |
| | | H | | |
| 299 | | core FcRn | artificial | TGHFGGLHP |
| | | BP-H | | |
| 300 | | cyclic | artificial | QRFCTGHFGGLHPCNG |
| | | FcRn BP- | | |
| | | H | | |
| 301 | — | HALB | human | DAHKSEVAHRFKDLGEENFKALVLIAFAQYLQQCPFEDHVKLVNEVTEFAKTCVADESAENC |
| | | | | DKSLHTLFGDKLCTVATLRETYGEMADCCAKQEPERNECFLQHKDDNPNLPRLVRPEVDVMC |
| | | | | TAFHDNEETFLKKYLYEIARRHPYFYAPELLFFAKRYKAAFTECCQAADKAACLLPKLDELR |
| | | | | DEGKASSAKQRLKCASLQKFGERAFKAWAVARLSQRFPKAEFAEVSKLVTDLTKVHTECCHG |
| | | | | DLLECADDRADLAKYICENQDSISSKLKECCEKPLLEKSHCIAEVENDEMPADLPSLAADFV |
| | | | | ESKDVCKNYAEAKDVFLGMFLYEYARRHPDYSVVLLLRLAKTYETTLEKCCAAADPHECYAK |
| | | | | VFDEFKPLVEEPQNLIKQNCELFEQLGEYKFQNALLVRYTKKVPQVSTPTLVEVSRNLGKVG |
| | | | | SKCCKHPEAKRMPCAEDYLSVVLNQLCVLHEKTPVSDRVTKCCTESLVNRRPCFSALEVDET |
| | | | | YVPKEFNAETFTFHADICTLSEKERQIKKQTALVELVKHKPKATKEQLKAVMDDFAAFVEKC |
| | | | | CKADDKETCFAEEGKKLVAASQAALGL |
| 302 | — | HALB | artificial | DAHKSEVAHRFKDLGEENFKALVLIAFAQYLQQCPFEDHVKLVNEVTEFAKTCVADESAENC |
| | | variant 1 | | DKSLHTLFGDKLCTVATLRETYGEMADCCAKQEPERNECFLQHKDDNPNLPRLVRPEVDVMC |
| | | | | TAFHDNEETFLKKYLYEIARRHPYFYAPELLFFAKRYKAAFTECCQAADKAACLLPKLDELR |
| | | | | DEGKASSAKQRLKCASLQKFGERAFKAWAVARLSQRFPKAEFAEVSKLVTDLTKVHTECCHG |
| | | | | DLLECADDRADLAKYICENQDSISSKLKECCEKPLLEKSHCIAEVENDEMPADLPSLAADFV |
| | | | | ESKDVCKNYAEAKDVFLGMFLYEYARRHPDYSVVLLLRLAKTYETTLEKCCAAADPHECYAK |
| | | | | VFDEFKPLVEEPQNLIKQNCELFEQLGEYKFQNALLVRYTKKVPQVSTPTLVEVSRNLGKVG |
| | | | | SKCCKHPEAKRMPCAEDYLSVVLNQLCVLHEKTPVSDRVTKCCTESLVNRRPCFSALEVDET |
| | | | | YVPKEFNAGTFTFHADICTLSEKERQIKKQTALVELVKHKPKATKEQLKAAMDDFAAFVEKC |
| | | | | CKADDKETCFAEEGKKLVAASQAALGL |
| 303 | — | HALB | artificial | DAHKSEVAHRFKDLGEENFKALVLIAFAQYLQQCPFEDHVKLVNEVTEFAKTCVADESAENC |
| | | variant 2 | | DKSLHTLFGDKLCTVATLRETYGEMADCCAKQEPERNECFLQHKDDNPNLPRLVRPEVDVMC |
| | | | | TAFHDNEETFLKKYLYEIARRHPYFYAPELLFFAKRYKAAFTECCQAADKAACLLPKLDELR |
| | | | | DEGKASSAKQRLKCASLQKFGERAFKAWAVARLSQRFPKAEFAEVSKLVTDLTKVHTECCHG |
| | | | | DLLECADDRADLAKYICENQDSISSKLKECCEKPLLEKSHCIAEVENDEMPADLPSLAADFV |
| | | | | ESKDVCKNYAEAKDVFLGMFLYEYARRHPDYSVVLLLRLAKTYETTLEKCCAAADPHECYAK |
| | | | | VFDEFKPLVEEPQNLIKQNCELFEQLGEYKFQNALLVRYTKKVPQVSTPTLVEVSRNLGKVG |
| | | | | SKCCKHPEAKRMPCAEDYLSVVLNQLCVLHEKTPVSDRVTKCCTESLVNRRPCFSALEVDET |
| | | | | YVPKEFNAETFTFHADICTLSEKERQIKKQTALVELVKHKPKATKEQLKAVMDDFAAFVEKC |
| | | | | CKADDKETCFAEEGPKLVAASQAALGL |
| 304 | — | HALB | artificial | DAHKSEVAHRFKDLGEENFKALVLIAFAQYLQQCPFEDHVKLVNEVTEFAKTCVADESAENC |
| | | variant 3 | | DKSLHTLFGDKLCTVATLRETYGEMADCCAKQEPERNECFLQHKDDNPNLPRLVRPEVDVMC |
| | | | | TAFHDNEETFLKKYLYEIARRHPYFYAPELLFFAKRYKAAFTECCQAADKAACLLPKLDELR |
| | | | | DEGKASSAKQRLKCASLQKFGERAFKAWAVARLSQRFPKAEFAEVSKLVTDLTKVHTECCHG |
| | | | | DLLECADDRADLAKYICENQDSISSKLKECCEKPLLEKSHCIAEVENDEMPADLPSLAADFV |
| | | | | ESKDVCKNYAEAKDVFLGMFLYEYARRHPDYSVVLLLRLAKTYETTLEKCCAAADPHECYAK |
| | | | | VFDEFKPLVEEPQNLIKQNCELFEQLGEYKFQNALLVRYTKKVPQVSTPTLVEVSRNLGKVG |
| | | | | SKCCKHPEAKRMPCAEDYLSVVLNQLCVLHEKTPVSDRVTKCCTESLVNRRPCFSALDVDET |
| | | | | YVPKEFNAETFTFHADICTLSEKERQIKKQTALVELVKHKPKATKEQLKAVMDDFAAFVEKC |
| | | | | CKADDKETCFAEEGPHLVAASKAALGL |
| 305 | — | HALB | artificial | DAHKSEVAHRFKDLGEENFKALVLIAFAQYLQQCPFEDHVKLVNEVTEFAKTCVADESAENC |
| | | variant 4 | | DKSLHTLFGDKLCTVATLRETYGEMADCCAKQEPERNECFLQHKDDNPNLPRLVRPEVDVMC |
| | | | | TAFHDNEETFLKKYLYEIARRHPYFYAPELLFFAKRYKAAFTECCQAADKAACLLPKLDELR |
| | | | | DEGKASSAKQRLKCASLQKFGERAFKAWAVARLSQRFPKAEFAEVSKLVTDLTKVHTECCHG |
| | | | | DLLECADDRADLAKYICENQDSISSKLKECCEKPLLEKSHCIAEVENDEMPADLPSLAADFV |
| | | | | ESKDVCKNYAEAKDVFLGMFLYEYARRHPDYSVVLLLRLAKTYETTLEKCCAAADPHECYAK |
| | | | | VFDEFKPLVEEPQNLIKQNCELFEQLGEYKFQNALLVRYTKKVPQVSTPTLVEVSRNLGKVG |
| | | | | SKCCKHPEAKRMPCAEDYLSVVLNQLCVLHEKTPVSDRVTKCCTESLVNRRPCFSALGVDET |
| | | | | YVPKEFNAETFTFHADICTLSEKERQIKKQTALVELVKHKPKATKEQLKAVMDKFAAFVEKC |
| | | | | CKADDKETCFAEEGPKLVAASQAALGL |
| 306 | — | HALB | artificial | DAHKSEVAHRFKDLGEENFKALVLIAFAQYLQQCPFEDHVKLVNEVTEFAKTCVADESAENC |
| | | variant 5 | | DKSLHTLFGDKLCTVATLRETYGEMADCCAKQEPERNECFLQHKDDNPNLPRLVRPEVDVMC |
| | | | | TAFHDNEETFLKKYLYEIARRHPYFYAPELLFFAKRYKAAFTECCQAADKAACLLPKLDELR |
| | | | | DEGKASSAKQRLKCASLQKFGERAFKAWAVARLSQRFPKAEFAEVSKLVTDLTKVHTECCHG |
| | | | | DLLECADDRADLAKYICENQDSISSKLKECCEKPLLEKSHCIAEVENDEMPADLPSLAADFV |
| | | | | ESKDVCKNYAEAKDVFLGMFLYEYARRHPDYSVVLLLRLAKTYETTLEKCCAAADPHECYAK |
| | | | | VFDEFKPLVEEPQNLIKQNCELFEQLGEYKFQNALLVRYTKKVPQVSTPTLVEVSRNLGKVG |
| | | | | SKCCKHPEAKRMPCAEDYLSVVLNQLCVLHEKTPVSDRVTKCCTESLVNRRPCFSALDVDET |
| | | | | YVPKEFNAETFTFHADICTLSEKERQIKKQTALVELVKHKPKATKEQLKAVMDKFAAFVEKC |
| | | | | CKADDKETCFAEEGPKLVAASQAALGL |
| 307 | — | HALB | artificial | DAHKSEVAHRFKDLGEENFKALVLIAFAQYLQQCPFEDHVKLVNEVTEFAKTCVADESAENC |
| | | variant 6 | | DKSLHTLFGDKLCTVATLRETYGEMADCCAKQEPERNECFLQHKDDNPNLPRLVRPEVDVMC |
| | | | | TAFHDNEETFLKKYLYEIARRHPYFYAPELLFFAKRYKAAFTECCQAADKAACLLPKLDELR |
| | | | | DEGKASSAKQRLKCASLQKFGERAFKAWAVARLSQRFPKAEFAEVSKLVTDLTKVHTECCHG |
| | | | | DLLECADDRADLAKYICENQDSISSKLKECCEKPLLEKSHCIAEVENDEMPADLPSLAADFV |
| | | | | ESKDVCKNYAEAKDVFLGMFLYEYARRHPDYSVVLLLRLAKTYETTLEKCCAAADPHECYAK |
| | | | | VFDEFKPLVEEPQNLIKQNCELFEQLGEYKFQNALLVRYTKKVPQVSTPTLVEVSRNLGKVG |
| | | | | SKCCKHPEAKRMPCAEDYLSVVLNQLCVLHEKTPVSDRVTKCCTESLVNRRPCFSALEVDET |
| | | | | YVPKEFNAETFTFHADICTLSEKERQIKKQTALVELVKHKPKATKEQLKAVMDKFAAFVEKC |
| | | | | CKADDKETCFAEEGPHLVAASQAALGL |
| 308 | — | HALB | artificial | DAHKSEVAHRFKDLGEENFKALVLIAFAQYLQQCPFEDHVKLVNEVTEFAKTCVADESAENC |
| | | variant 7 | | DKSLHTLFGDKLCTVATLRETYGEMADCCAKQEPERNECFLQHKDDNPNLPRLVRPEVDVMC |
| | | | | TAFHDNEETFLKKYLYEIARRHPYFYAPELLFFAKRYKAAFTECCQAADKAACLLPKLDELR |
| | | | | DEGKASSAKQRLKCASLQKFGERAFKAWAVARLSQRFPKAEFAEVSKLVTDLTKVHTECCHG |
| | | | | DLLECADDRADLAKYICENQDSISSKLKECCEKPLLEKSHCIAEVENDEMPADLPSLAADFV |
| | | | | ESKDVCKNYAEAKDVFLGMFLYEYARRHPDYSVVLLLRLAKTYETTLEKCCAAADPHECYAK |
| | | | | VFDEFKPLVEEPQNLIKQNCELFEQLGEYKFQNALLVRYTKKVPQVSTPTLVEVSRNLGKVG |
| | | | | SKCCKHPEAKRMPCAEDYLSVVLNQLCVLHEKTPVSDRVTKCCTESLVNRRPCFSALEVDET |
| | | | | YVPKEFNAETFTFHADICTLSEKERQIKKQTALVELVKHKPKATKEQLKAVMDDFAAFVEKC |
| | | | | CKADDKETCFAEEGPHLVAASKAALGL |
| 309 | — | HALB | artificial | DAHKSEVAHRFKDLGEENFKALVLIAFAQYLQQCPFEDHVKLVNEVTEFAKTCVADESAENC |
| | | variant 8 | | DKSLHTLFGDKLCTVATLRETYGEMADCCAKQEPERNECFLQHKDDNPNLPRLVRPEVDVMC |
| | | | | TAFHDNEETFLKKYLYEIARRHPYFYAPELLFFAKRYKAAFTECCQAADKAACLLPKLDELR |
| | | | | DEGKASSAKQRLKCASLQKFGERAFKAWAVARLSQRFPKAEFAEVSKLVTDLTKVHTECCHG |
| | | | | DLLECADDRADLAKYICENQDSISSKLKECCEKPLLEKSHCIAEVENDEMPADLPSLAADFV |
| | | | | ESKDVCKNYAEAKDVFLGMFLYEYARRHPDYSVVLLLRLAKTYETTLEKCCAAADPHECYAK |
| | | | | VFDEFKPLVEEPQNLIKQNCELFEQLGEYKFQNALLVRYTKKVPQVSTPTLVEVSRNLGKVG |
| | | | | SKCCKHPEAKRMPCAEDYLSVVLNQLCVLHEKTPVSDRVTKCCTESLVNRRPCFSALEVDET |
| | | | | YVPKEFNAETFTFHADICTLSEKERQIKKQTALVELVKHKPKATKEQLKAVMDKFAAFVEKC |
| | | | | CKADDKETCFAEEGPKLVAASKAALGL |
| 310 | — | HALB | artificial | DAHKSEVAHRFKDLGEENFKALVLIAFAQYLQQCPFEDHVKLVNEVTEFAKTCVADESAENC |
| | | variant 9 | | DKSLHTLFGDKLCTVATLRETYGEMADCCAKQEPERNECFLQHKDDNPNLPRLVRPEVDVMC |
| | | | | TAFHDNEETFLKKYLYEIARRHPYFYAPELLFFAKRYKAAFTECCQAADKAACLLPKLDELR |
| | | | | DEGKASSAKQRLKCASLQKFGERAFKAWAVARLSQRFPKAEFAEVSKLVTDLTKVHTECCHG |
| | | | | DLLECADDRADLAKYICENQDSISSKLKECCEKPLLEKSHCIAEVENDEMPADLPSLAADFV |
| | | | | ESKDVCKNYAEAKDVFLGMFLYEYARRHPDYSVVLLLRLAKTYETTLEKCCAAADPHECYAK |
| | | | | VFDEFKPLVEEPQNLIKQNCELFEQLGEYKFQNALLVRYTKKVPQVSTPTLVEVSRNLGKVG |
| | | | | SKCCKHPEAKRMPCAEDYLSVVLNQLCVLHEKTPVSDRVTKCCTESLVNRRPCFSALDVDET |
| | | | | YVPKEFNAETFTFHADICTLSEKERQIKKQTALVELVKHKPKATKEQLKAVMDDFAAFVEKC |
| | | | | CKADDKETCFAEEGPKLVAASKAALGL |
| 311 | — | HALB | artificial | DAHKSEVAHRFKDLGEENFKALVLIAFAQYLQQSPFEDHVKLVNEVTEFAKTCVADESAENC |
| | | variant 10 | | DKSLHTLFGDKLCTVATLRETYGEMADCCAKQEPERNECFLQHKDDNPNLPRLVRPEVDVMC |
| | | | | TAFHDNEETFLKKYLYEIARRHPYFYAPELLFFAKRYKAAFTECCQAADKAACLLPKLDELR |
| | | | | DEGKASSAKQRLKCASLQKFGERAFKAWAVARLSQRFPKAEFAEVSKLVTDLTKVHTECCHG |
| | | | | DLLECADDRADLAKYICENQDSISSKLKECCEKPLLEKSHCIAEVENDEMPADLPSLAADFV |
| | | | | ESKDVCKNYAEAKDVFLGMFLYEYARRHPDYSVVLLLRLAKTYETTLEKCCAAADPHECYAK |
| | | | | VFDEFKPLVEEPQNLIKQNCELFEQLGEYKFQNALLVRYTKKVPQVSTPTLVEVSRNLGKVG |
| | | | | SKCCKHPEAKRMPCAEDYLSVVLNQLCVLHEKTPVSDRVTKCCTESLVNRRPCFSALEVDET |
| | | | | YVPKEFNAETFTFHADICTLSEKERQIKKQTALVELVKHKPKATKEQLKAVMDDFAAFVEKC |
| | | | | CKADDKETCFAEEGKKLVAASQAALGL |
| 312 | — | HALB | artificial | DAHKSEVAHRFKDLGEENFKALVLIAFAQYLQQSPFEDHVKLVNEVTEFAKTCVADESAENC |
| | | variant 11 | | DKSLHTLFGDKLCTVATLRETYGEMADCCAKQEPERNECFLQHKDDNPNLPRLVRPEVDVMC |
| | | | | TAFHDNEETFLKKYLYEIARRHPYFYAPELLFFAKRYKAAFTECCQAADKAACLLPKLDELR |
| | | | | DEGKASSAKQRLKCASLQKFGERAFKAWAVARLSQRFPKAEFAEVSKLVTDLTKVHTECCHG |
| | | | | DLLECADDRADLAKYICENQDSISSKLKECCEKPLLEKSHCIAEVENDEMPADLPSLAADFV |
| | | | | ESKDVCKNYAEAKDVFLGMFLYEYARRHPDYSVVLLLRLAKTYETTLEKCCAAADPHECYAK |
| | | | | VFDEFKPLVEEPQNLIKQNCELFEQLGEYKFQNALLVRYTKKVPQVSTPTLVEVSRNLGKVG |
| | | | | SKCCKHPEAKRMPCAEDYLSVVLNQLCVLHEKTPVSDRVTKCCTESLVNRRPCFSALEVDET |
| | | | | YVPKEFNAGTFTFHADICTLSEKERQIKKQTALVELVKHKPKATKEQLKAAMDDFAAFVEKC |
| | | | | CKADDKETCFAEEGKKLVAASQAALGL |
| 313 | — | HALB | artificial | DAHKSEVAHRFKDLGEENFKALVLIAFAQYLQQSPFEDHVKLVNEVTEFAKTCVADESAENC |
| | | variant 12 | | DKSLHTLFGDKLCTVATLRETYGEMADCCAKQEPERNECFLQHKDDNPNLPRLVRPEVDVMC |
| | | | | TAFHDNEETFLKKYLYEIARRHPYFYAPELLFFAKRYKAAFTECCQAADKAACLLPKLDELR |
| | | | | DEGKASSAKQRLKCASLQKFGERAFKAWAVARLSQRFPKAEFAEVSKLVTDLTKVHTECCHG |
| | | | | DLLECADDRADLAKYICENQDSISSKLKECCEKPLLEKSHCIAEVENDEMPADLPSLAADFV |
| | | | | ESKDVCKNYAEAKDVFLGMFLYEYARRHPDYSVVLLLRLAKTYETTLEKCCAAADPHECYAK |
| | | | | VFDEFKPLVEEPQNLIKQNCELFEQLGEYKFQNALLVRYTKKVPQVSTPTLVEVSRNLGKVG |
| | | | | SKCCKHPEAKRMPCAEDYLSVVLNQLCVLHEKTPVSDRVTKCCTESLVNRRPCFSALEVDET |
| | | | | YVPKEFNAETFTFHADICTLSEKERQIKKQTALVELVKHKPKATKEQLKAVMDDFAAFVEKC |
| | | | | CKADDKETCFAEEGPKLVAASQAALGL |
| 314 | — | HALB | artificial | DAHKSEVAHRFKDLGEENFKALVLIAFAQYLQQSPFEDHVKLVNEVTEFAKTCVADESAENC |
| | | variant 13 | | DKSLHTLFGDKLCTVATLRETYGEMADCCAKQEPERNECFLQHKDDNPNLPRLVRPEVDVMC |
| | | | | TAFHDNEETFLKKYLYEIARRHPYFYAPELLFFAKRYKAAFTECCQAADKAACLLPKLDELR |
| | | | | DEGKASSAKQRLKCASLQKFGERAFKAWAVARLSQRFPKAEFAEVSKLVTDLTKVHTECCHG |
| | | | | DLLECADDRADLAKYICENQDSISSKLKECCEKPLLEKSHCIAEVENDEMPADLPSLAADFV |
| | | | | ESKDVCKNYAEAKDVFLGMFLYEYARRHPDYSVVLLLRLAKTYETTLEKCCAAADPHECYAK |
| | | | | VFDEFKPLVEEPQNLIKQNCELFEQLGEYKFQNALLVRYTKKVPQVSTPTLVEVSRNLGKVG |
| | | | | SKCCKHPEAKRMPCAEDYLSVVLNQLCVLHEKTPVSDRVTKCCTESLVNRRPCFSALDVDET |
| | | | | YVPKEFNAETFTFHADICTLSEKERQIKKQTALVELVKHKPKATKEQLKAVMDDFAAFVEKC |
| | | | | CKADDKETCFAEEGPHLVAASKAALGL |
| 315 | — | HALB | artificial | DAHKSEVAHRFKDLGEENFKALVLIAFAQYLQQSPFEDHVKLVNEVTEFAKTCVADESAENC |
| | | variant 14 | | DKSLHTLFGDKLCTVATLRETYGEMADCCAKQEPERNECFLQHKDDNPNLPRLVRPEVDVMC |
| | | | | TAFHDNEETFLKKYLYEIARRHPYFYAPELLFFAKRYKAAFTECCQAADKAACLLPKLDELR |
| | | | | DEGKASSAKQRLKCASLQKFGERAFKAWAVARLSQRFPKAEFAEVSKLVTDLTKVHTECCHG |
| | | | | DLLECADDRADLAKYICENQDSISSKLKECCEKPLLEKSHCIAEVENDEMPADLPSLAADFV |
| | | | | ESKDVCKNYAEAKDVFLGMFLYEYARRHPDYSVVLLLRLAKTYETTLEKCCAAADPHECYAK |
| | | | | VFDEFKPLVEEPQNLIKQNCELFEQLGEYKFQNALLVRYTKKVPQVSTPTLVEVSRNLGKVG |
| | | | | SKCCKHPEAKRMPCAEDYLSVVLNQLCVLHEKTPVSDRVTKCCTESLVNRRPCFSALGVDET |
| | | | | YVPKEFNAETFTFHADICTLSEKERQIKKQTALVELVKHKPKATKEQLKAVMDKFAAFVEKC |
| | | | | CKADDKETCFAEEGPKLVAASQAALGL |
| 316 | — | HALB | artificial | DAHKSEVAHRFKDLGEENFKALVLIAFAQYLQQSPFEDHVKLVNEVTEFAKTCVADESAENC |
| | | variant 15 | | DKSLHTLFGDKLCTVATLRETYGEMADCCAKQEPERNECFLQHKDDNPNLPRLVRPEVDVMC |
| | | | | TAFHDNEETFLKKYLYEIARRHPYFYAPELLFFAKRYKAAFTECCQAADKAACLLPKLDELR |
| | | | | DEGKASSAKQRLKCASLQKFGERAFKAWAVARLSQRFPKAEFAEVSKLVTDLTKVHTECCHG |
| | | | | DLLECADDRADLAKYICENQDSISSKLKECCEKPLLEKSHCIAEVENDEMPADLPSLAADFV |
| | | | | ESKDVCKNYAEAKDVFLGMFLYEYARRHPDYSVVLLLRLAKTYETTLEKCCAAADPHECYAK |
| | | | | VFDEFKPLVEEPQNLIKQNCELFEQLGEYKFQNALLVRYTKKVPQVSTPTLVEVSRNLGKVG |
| | | | | SKCCKHPEAKRMPCAEDYLSVVLNQLCVLHEKTPVSDRVTKCCTESLVNRRPCFSALDVDET |
| | | | | YVPKEFNAETFTFHADICTLSEKERQIKKQTALVELVKHKPKATKEQLKAVMDKFAAFVEKC |
| | | | | CKADDKETCFAEEGPKLVAASQAALGL |
| 317 | — | HALB | artificial | DAHKSEVAHRFKDLGEENFKALVLIAFAQYLQQSPFEDHVKLVNEVTEFAKTCVADESAENC |
| | | variant 16 | | DKSLHTLFGDKLCTVATLRETYGEMADCCAKQEPERNECFLQHKDDNPNLPRLVRPEVDVMC |
| | | | | TAFHDNEETFLKKYLYEIARRHPYFYAPELLFFAKRYKAAFTECCQAADKAACLLPKLDELR |
| | | | | DEGKASSAKQRLKCASLQKFGERAFKAWAVARLSQRFPKAEFAEVSKLVTDLTKVHTECCHG |
| | | | | DLLECADDRADLAKYICENQDSISSKLKECCEKPLLEKSHCIAEVENDEMPADLPSLAADFV |
| | | | | ESKDVCKNYAEAKDVFLGMFLYEYARRHPDYSVVLLLRLAKTYETTLEKCCAAADPHECYAK |
| | | | | VFDEFKPLVEEPQNLIKQNCELFEQLGEYKFQNALLVRYTKKVPQVSTPTLVEVSRNLGKVG |
| | | | | SKCCKHPEAKRMPCAEDYLSVVLNQLCVLHEKTPVSDRVTKCCTESLVNRRPCFSALEVDET |
| | | | | YVPKEFNAETFTFHADICTLSEKERQIKKQTALVELVKHKPKATKEQLKAVMDKFAAFVEKC |
| | | | | CKADDKETCFAEEGPHLVAASQAALGL |
| 318 | — | HALB | artificial | DAHKSEVAHRFKDLGEENFKALVLIAFAQYLQQSPFEDHVKLVNEVTEFAKTCVADESAENC |
| | | variant 17 | | DKSLHTLFGDKLCTVATLRETYGEMADCCAKQEPERNECFLQHKDDNPNLPRLVRPEVDVMC |
| | | | | TAFHDNEETFLKKYLYEIARRHPYFYAPELLFFAKRYKAAFTECCQAADKAACLLPKLDELR |
| | | | | DEGKASSAKQRLKCASLQKFGERAFKAWAVARLSQRFPKAEFAEVSKLVTDLTKVHTECCHG |
| | | | | DLLECADDRADLAKYICENQDSISSKLKECCEKPLLEKSHCIAEVENDEMPADLPSLAADFV |
| | | | | ESKDVCKNYAEAKDVFLGMFLYEYARRHPDYSVVLLLRLAKTYETTLEKCCAAADPHECYAK |
| | | | | VFDEFKPLVEEPQNLIKQNCELFEQLGEYKFQNALLVRYTKKVPQVSTPTLVEVSRNLGKVG |
| | | | | SKCCKHPEAKRMPCAEDYLSVVLNQLCVLHEKTPVSDRVTKCCTESLVNRRPCFSALEVDET |
| | | | | YVPKEFNAETFTFHADICTLSEKERQIKKQTALVELVKHKPKATKEQLKAVMDDFAAFVEKC |
| | | | | CKADDKETCFAEEGPHLVAASKAALGL |
| 319 | — | HALB | artificial | DAHKSEVAHRFKDLGEENFKALVLIAFAQYLQQSPFEDHVKLVNEVTEFAKTCVADESAENC |
| | | variant 18 | | DKSLHTLFGDKLCTVATLRETYGEMADCCAKQEPERNECFLQHKDDNPNLPRLVRPEVDVMC |
| | | | | TAFHDNEETFLKKYLYEIARRHPYFYAPELLFFAKRYKAAFTECCQAADKAACLLPKLDELR |
| | | | | DEGKASSAKQRLKCASLQKFGERAFKAWAVARLSQRFPKAEFAEVSKLVTDLTKVHTECCHG |
| | | | | DLLECADDRADLAKYICENQDSISSKLKECCEKPLLEKSHCIAEVENDEMPADLPSLAADFV |
| | | | | ESKDVCKNYAEAKDVFLGMFLYEYARRHPDYSVVLLLRLAKTYETTLEKCCAAADPHECYAK |
| | | | | VFDEFKPLVEEPQNLIKQNCELFEQLGEYKFQNALLVRYTKKVPQVSTPTLVEVSRNLGKVG |
| | | | | SKCCKHPEAKRMPCAEDYLSVVLNQLCVLHEKTPVSDRVTKCCTESLVNRRPCFSALEVDET |
| | | | | YVPKEFNAETFTFHADICTLSEKERQIKKQTALVELVKHKPKATKEQLKAVMDKFAAFVEKC |
| | | | | CKADDKETCFAEEGPKLVAASKAALGL |
| 320 | — | HALB | artificial | DAHKSEVAHRFKDLGEENFKALVLIAFAQYLQQSPFEDHVKLVNEVTEFAKTCVADESAENC |
| | | variant 19 | | DKSLHTLFGDKLCTVATLRETYGEMADCCAKQEPERNECFLQHKDDNPNLPRLVRPEVDVMC |
| | | | | TAFHDNEETFLKKYLYEIARRHPYFYAPELLFFAKRYKAAFTECCQAADKAACLLPKLDELR |
| | | | | DEGKASSAKQRLKCASLQKFGERAFKAWAVARLSQRFPKAEFAEVSKLVTDLTKVHTECCHG |
| | | | | DLLECADDRADLAKYICENQDSISSKLKECCEKPLLEKSHCIAEVENDEMPADLPSLAADFV |
| | | | | ESKDVCKNYAEAKDVFLGMFLYEYARRHPDYSVVLLLRLAKTYETTLEKCCAAADPHECYAK |
| | | | | VFDEFKPLVEEPQNLIKQNCELFEQLGEYKFQNALLVRYTKKVPQVSTPTLVEVSRNLGKVG |
| | | | | SKCCKHPEAKRMPCAEDYLSVVLNQLCVLHEKTPVSDRVTKCCTESLVNRRPCFSALDVDET |
| | | | | YVPKEFNAETFTFHADICTLSEKERQIKKQTALVELVKHKPKATKEQLKAVMDDFAAFVEKC |
| | | | | CKADDKETCFAEEGPKLVAASKAALGL |
| 321 | — | HALB | artificial | DAHKSEVAHRFKDLGEENFKALVLIAFAQYLQQAPFEDHVKLVNEVTEFAKTCVADESAENC |
| | | variant 20 | | DKSLHTLFGDKLCTVATLRETYGEMADCCAKQEPERNECFLQHKDDNPNLPRLVRPEVDVMC |
| | | | | TAFHDNEETFLKKYLYEIARRHPYFYAPELLFFAKRYKAAFTECCQAADKAACLLPKLDELR |
| | | | | DEGKASSAKQRLKCASLQKFGERAFKAWAVARLSQRFPKAEFAEVSKLVTDLTKVHTECCHG |
| | | | | DLLECADDRADLAKYICENQDSISSKLKECCEKPLLEKSHCIAEVENDEMPADLPSLAADFV |
| | | | | ESKDVCKNYAEAKDVFLGMFLYEYARRHPDYSVVLLLRLAKTYETTLEKCCAAADPHECYAK |
| | | | | VFDEFKPLVEEPQNLIKQNCELFEQLGEYKFQNALLVRYTKKVPQVSTPTLVEVSRNLGKVG |
| | | | | SKCCKHPEAKRMPCAEDYLSVVLNQLCVLHEKTPVSDRVTKCCTESLVNRRPCFSALEVDET |
| | | | | YVPKEFNAETFTFHADICTLSEKERQIKKQTALVELVKHKPKATKEQLKAVMDDFAAFVEKC |
| | | | | CKADDKETCFAEEGKKLVAASQAALGL |
| 322 | — | HALB | artificial | DAHKSEVAHRFKDLGEENFKALVLIAFAQYLQQAPFEDHVKLVNEVTEFAKTCVADESAENC |
| | | variant 21 | | DKSLHTLFGDKLCTVATLRETYGEMADCCAKQEPERNECFLQHKDDNPNLPRLVRPEVDVMC |
| | | | | TAFHDNEETFLKKYLYEIARRHPYFYAPELLFFAKRYKAAFTECCQAADKAACLLPKLDELR |
| | | | | DEGKASSAKQRLKCASLQKFGERAFKAWAVARLSQRFPKAEFAEVSKLVTDLTKVHTECCHG |
| | | | | DLLECADDRADLAKYICENQDSISSKLKECCEKPLLEKSHCIAEVENDEMPADLPSLAADFV |
| | | | | ESKDVCKNYAEAKDVFLGMFLYEYARRHPDYSVVLLLRLAKTYETTLEKCCAAADPHECYAK |
| | | | | VFDEFKPLVEEPQNLIKQNCELFEQLGEYKFQNALLVRYTKKVPQVSTPTLVEVSRNLGKVG |
| | | | | SKCCKHPEAKRMPCAEDYLSVVLNQLCVLHEKTPVSDRVTKCCTESLVNRRPCFSALEVDET |
| | | | | YVPKEFNAGTFTFHADICTLSEKERQIKKQTALVELVKHKPKATKEQLKAAMDDFAAFVEKC |
| | | | | CKADDKETCFAEEGKKLVAASQAALGL |
| 323 | — | HALB | artificial | DAHKSEVAHRFKDLGEENFKALVLIAFAQYLQQAPFEDHVKLVNEVTEFAKTCVADESAENC |
| | | variant 22 | | DKSLHTLFGDKLCTVATLRETYGEMADCCAKQEPERNECFLQHKDDNPNLPRLVRPEVDVMC |
| | | | | TAFHDNEETFLKKYLYEIARRHPYFYAPELLFFAKRYKAAFTECCQAADKAACLLPKLDELR |
| | | | | DEGKASSAKQRLKCASLQKFGERAFKAWAVARLSQRFPKAEFAEVSKLVTDLTKVHTECCHG |
| | | | | DLLECADDRADLAKYICENQDSISSKLKECCEKPLLEKSHCIAEVENDEMPADLPSLAADFV |
| | | | | ESKDVCKNYAEAKDVFLGMFLYEYARRHPDYSVVLLLRLAKTYETTLEKCCAAADPHECYAK |
| | | | | VFDEFKPLVEEPQNLIKQNCELFEQLGEYKFQNALLVRYTKKVPQVSTPTLVEVSRNLGKVG |
| | | | | SKCCKHPEAKRMPCAEDYLSVVLNQLCVLHEKTPVSDRVTKCCTESLVNRRPCFSALEVDET |
| | | | | YVPKEFNAETFTFHADICTLSEKERQIKKQTALVELVKHKPKATKEQLKAVMDDFAAFVEKC |
| | | | | CKADDKETCFAEEGPKLVAASQAALGL |
| 324 | — | HALB | artificial | DAHKSEVAHRFKDLGEENFKALVLIAFAQYLQQAPFEDHVKLVNEVTEFAKTCVADESAENC |
| | | variant 23 | | DKSLHTLFGDKLCTVATLRETYGEMADCCAKQEPERNECFLQHKDDNPNLPRLVRPEVDVMC |
| | | | | TAFHDNEETFLKKYLYEIARRHPYFYAPELLFFAKRYKAAFTECCQAADKAACLLPKLDELR |
| | | | | DEGKASSAKQRLKCASLQKFGERAFKAWAVARLSQRFPKAEFAEVSKLVTDLTKVHTECCHG |
| | | | | DLLECADDRADLAKYICENQDSISSKLKECCEKPLLEKSHCIAEVENDEMPADLPSLAADFV |
| | | | | ESKDVCKNYAEAKDVFLGMFLYEYARRHPDYSVVLLLRLAKTYETTLEKCCAAADPHECYAK |
| | | | | VFDEFKPLVEEPQNLIKQNCELFEQLGEYKFQNALLVRYTKKVPQVSTPTLVEVSRNLGKVG |
| | | | | SKCCKHPEAKRMPCAEDYLSVVLNQLCVLHEKTPVSDRVTKCCTESLVNRRPCFSALDVDET |
| | | | | YVPKEFNAETFTFHADICTLSEKERQIKKQTALVELVKHKPKATKEQLKAVMDDFAAFVEKC |
| | | | | CKADDKETCFAEEGPHLVAASKAALGL |
| 325 | — | HALB | artificial | DAHKSEVAHRFKDLGEENFKALVLIAFAQYLQQAPFEDHVKLVNEVTEFAKTCVADESAENC |
| | | variant 24 | | DKSLHTLFGDKLCTVATLRETYGEMADCCAKQEPERNECFLQHKDDNPNLPRLVRPEVDVMC |
| | | | | TAFHDNEETFLKKYLYEIARRHPYFYAPELLFFAKRYKAAFTECCQAADKAACLLPKLDELR |
| | | | | DEGKASSAKQRLKCASLQKFGERAFKAWAVARLSQRFPKAEFAEVSKLVTDLTKVHTECCHG |
| | | | | DLLECADDRADLAKYICENQDSISSKLKECCEKPLLEKSHCIAEVENDEMPADLPSLAADFV |
| | | | | ESKDVCKNYAEAKDVFLGMFLYEYARRHPDYSVVLLLRLAKTYETTLEKCCAAADPHECYAK |
| | | | | VFDEFKPLVEEPQNLIKQNCELFEQLGEYKFQNALLVRYTKKVPQVSTPTLVEVSRNLGKVG |
| | | | | SKCCKHPEAKRMPCAEDYLSVVLNQLCVLHEKTPVSDRVTKCCTESLVNRRPCFSALGVDET |
| | | | | YVPKEFNAETFTFHADICTLSEKERQIKKQTALVELVKHKPKATKEQLKAVMDKFAAFVEKC |
| | | | | CKADDKETCFAEEGPKLVAASQAALGL |
| 326 | — | HALB | artificial | DAHKSEVAHRFKDLGEENFKALVLIAFAQYLQQAPFEDHVKLVNEVTEFAKTCVADESAENC |
| | | variant 25 | | DKSLHTLFGDKLCTVATLRETYGEMADCCAKQEPERNECFLQHKDDNPNLPRLVRPEVDVMC |
| | | | | TAFHDNEETFLKKYLYEIARRHPYFYAPELLFFAKRYKAAFTECCQAADKAACLLPKLDELR |
| | | | | DEGKASSAKQRLKCASLQKFGERAFKAWAVARLSQRFPKAEFAEVSKLVTDLTKVHTECCHG |
| | | | | DLLECADDRADLAKYICENQDSISSKLKECCEKPLLEKSHCIAEVENDEMPADLPSLAADFV |
| | | | | ESKDVCKNYAEAKDVFLGMFLYEYARRHPDYSVVLLLRLAKTYETTLEKCCAAADPHECYAK |
| | | | | VFDEFKPLVEEPQNLIKQNCELFEQLGEYKFQNALLVRYTKKVPQVSTPTLVEVSRNLGKVG |
| | | | | SKCCKHPEAKRMPCAEDYLSVVLNQLCVLHEKTPVSDRVTKCCTESLVNRRPCFSALDVDET |
| | | | | YVPKEFNAETFTFHADICTLSEKERQIKKQTALVELVKHKPKATKEQLKAVMDKFAAFVEKC |
| | | | | CKADDKETCFAEEGPKLVAASQAALGL |
| 327 | — | HALB | artificial | DAHKSEVAHRFKDLGEENFKALVLIAFAQYLQQAPFEDHVKLVNEVTEFAKTCVADESAENC |
| | | variant 26 | | DKSLHTLFGDKLCTVATLRETYGEMADCCAKQEPERNECFLQHKDDNPNLPRLVRPEVDVMC |
| | | | | TAFHDNEETFLKKYLYEIARRHPYFYAPELLFFAKRYKAAFTECCQAADKAACLLPKLDELR |
| | | | | DEGKASSAKQRLKCASLQKFGERAFKAWAVARLSQRFPKAEFAEVSKLVTDLTKVHTECCHG |
| | | | | DLLECADDRADLAKYICENQDSISSKLKECCEKPLLEKSHCIAEVENDEMPADLPSLAADFV |
| | | | | ESKDVCKNYAEAKDVFLGMFLYEYARRHPDYSVVLLLRLAKTYETTLEKCCAAADPHECYAK |
| | | | | VFDEFKPLVEEPQNLIKQNCELFEQLGEYKFQNALLVRYTKKVPQVSTPTLVEVSRNLGKVG |
| | | | | SKCCKHPEAKRMPCAEDYLSVVLNQLCVLHEKTPVSDRVTKCCTESLVNRRPCFSALEVDET |
| | | | | YVPKEFNAETFTFHADICTLSEKERQIKKQTALVELVKHKPKATKEQLKAVMDKFAAFVEKC |
| | | | | CKADDKETCFAEEGPHLVAASQAALGL |
| 328 | — | HALB | artificial | DAHKSEVAHRFKDLGEENFKALVLIAFAQYLQQAPFEDHVKLVNEVTEFAKTCVADESAENC |
| | | variant 27 | | DKSLHTLFGDKLCTVATLRETYGEMADCCAKQEPERNECFLQHKDDNPNLPRLVRPEVDVMC |
| | | | | TAFHDNEETFLKKYLYEIARRHPYFYAPELLFFAKRYKAAFTECCQAADKAACLLPKLDELR |
| | | | | DEGKASSAKQRLKCASLQKFGERAFKAWAVARLSQRFPKAEFAEVSKLVTDLTKVHTECCHG |
| | | | | DLLECADDRADLAKYICENQDSISSKLKECCEKPLLEKSHCIAEVENDEMPADLPSLAADFV |
| | | | | ESKDVCKNYAEAKDVFLGMFLYEYARRHPDYSVVLLLRLAKTYETTLEKCCAAADPHECYAK |
| | | | | VFDEFKPLVEEPQNLIKQNCELFEQLGEYKFQNALLVRYTKKVPQVSTPTLVEVSRNLGKVG |
| | | | | SKCCKHPEAKRMPCAEDYLSVVLNQLCVLHEKTPVSDRVTKCCTESLVNRRPCFSALEVDET |
| | | | | YVPKEFNAETFTFHADICTLSEKERQIKKQTALVELVKHKPKATKEQLKAVMDDFAAFVEKC |
| | | | | CKADDKETCFAEEGPHLVAASKAALGL |
| 329 | — | HALB | artificial | DAHKSEVAHRFKDLGEENFKALVLIAFAQYLQQAPFEDHVKLVNEVTEFAKTCVADESAENC |
| | | variant 28 | | DKSLHTLFGDKLCTVATLRETYGEMADCCAKQEPERNECFLQHKDDNPNLPRLVRPEVDVMC |
| | | | | TAFHDNEETFLKKYLYEIARRHPYFYAPELLFFAKRYKAAFTECCQAADKAACLLPKLDELR |
| | | | | DEGKASSAKQRLKCASLQKFGERAFKAWAVARLSQRFPKAEFAEVSKLVTDLTKVHTECCHG |
| | | | | DLLECADDRADLAKYICENQDSISSKLKECCEKPLLEKSHCIAEVENDEMPADLPSLAADFV |
| | | | | ESKDVCKNYAEAKDVFLGMFLYEYARRHPDYSVVLLLRLAKTYETTLEKCCAAADPHECYAK |
| | | | | VFDEFKPLVEEPQNLIKQNCELFEQLGEYKFQNALLVRYTKKVPQVSTPTLVEVSRNLGKVG |
| | | | | SKCCKHPEAKRMPCAEDYLSVVLNQLCVLHEKTPVSDRVTKCCTESLVNRRPCFSALEVDET |
| | | | | YVPKEFNAETFTFHADICTLSEKERQIKKQTALVELVKHKPKATKEQLKAVMDKFAAFVEKC |
| | | | | CKADDKETCFAEEGPKLVAASKAALGL |
| 330 | — | HALB | artificial | DAHKSEVAHRFKDLGEENFKALVLIAFAQYLQQAPFEDHVKLVNEVTEFAKTCVADESAENC |
| | | variant 29 | | DKSLHTLFGDKLCTVATLRETYGEMADCCAKQEPERNECFLQHKDDNPNLPRLVRPEVDVMC |
| | | | | TAFHDNEETFLKKYLYEIARRHPYFYAPELLFFAKRYKAAFTECCQAADKAACLLPKLDELR |
| | | | | DEGKASSAKQRLKCASLQKFGERAFKAWAVARLSQRFPKAEFAEVSKLVTDLTKVHTECCHG |
| | | | | DLLECADDRADLAKYICENQDSISSKLKECCEKPLLEKSHCIAEVENDEMPADLPSLAADFV |
| | | | | ESKDVCKNYAEAKDVFLGMFLYEYARRHPDYSVVLLLRLAKTYETTLEKCCAAADPHECYAK |
| | | | | VFDEFKPLVEEPQNLIKQNCELFEQLGEYKFQNALLVRYTKKVPQVSTPTLVEVSRNLGKVG |
| | | | | SKCCKHPEAKRMPCAEDYLSVVLNQLCVLHEKTPVSDRVTKCCTESLVNRRPCFSALDVDET |
| | | | | YVPKEFNAETFTFHADICTLSEKERQIKKQTALVELVKHKPKATKEQLKAVMDDFAAFVEKC |
| | | | | CKADDKETCFAEEGPKLVAASKAALGL |
| 331 | — | Cross | artificial | ASTKGPSVFPLAPSSKSTSGGTAALGCLVKDYFPEPVTVSWNSGALTSGVHTFPAVLQSSGL |
| | | body 1 | | YSLSSVVTVPSSSLGTQTYICNVNHKPSNTKVDKKVEPKSCDKTHTCPPCPAPELLGGPSVF |
| | | HC | | LFPPKPKDTLMISRTPEVTCVVVDVSHEDPEVKFNWYVDGVEVHNAKTKPCEEQYGSTYRCV |
| | | | | SVLTVLHQDWLNGKEYKCKVSNKALPAPIEKTISKAKGQPREPQVYTLPPSREEMTKNQVSL |
| | | | | TCLVKGFYPSDIAVEWESNGQPENNYDTTPPVLDSDGSFFLYSDLTVDKSRWQQGNVFSCSV |
| | | | | MHEALHNHYTQKSLSLSPGK |
| 332 | — | Cross | artificial | GQPKAAPSVTLFPPSSEELQANKATLVCLISDFYPGAVTVAWKADSSPVKAGVETTTPSKQS |
| | | body 1 | | NNKYAASSYLSLTPEQWKSHRSYSCQVTHEGSTVEKTVAPTECSDKTHTCPPCPAPELLGGP |
| | | LC | | SVFLFPPKPKDTLMISRTPEVTCVVVDVSHEDPEVKFNWYVDGVEVHNAKTKPCEEQYGSTY |
| | | | | RCVSVLTVLHQDWLNGKEYKCKVSNKALPAPIEKTISKAKGQPREPQVYTLPPSRKEMTKNQ |
| | | | | VSLTCLVKGFYPSDIAVEWESNGQPENNYKTTPPVLKSDGSFFLYSKLTVDKSRWQQGNVFS |
| | | | | CSVMHEALHNHYTQKSLSLSPGK |
| 333 | — | Cross | artificial | ASTKGPSVFPLAPCSRSTSESTAALGCLVKDYFPEPVTVSWNSGALTSGVHTFPAVLQSSGL |
| | | body 2 | | YSLSSVVTVPSSNFGTQTYTCNVDHKPSNTKVDKTVEPKSSDKTHTCPPCPAPEAAGGPSVF |
| | | HC | | LFPPKPKDTLMISRTPEVTCVVVDVSHEDPEVKFNWYVDGVEVHNAKTKPREEQYNSTYRVV |
| | | | | SVLTVLHQDWLNGKEYKCKVSNKALPAPIEKTISKAKGQPREPQVYTLPPSREEMTKNQVSL |
| | | | | TCLVKGFYPSDIAVEWESNGQPENNYDTTPPVLDSDGSFFLYSDLTVDKSRWQQGNVFSCSV |
| | | | | MHEALHNHYTQKSLSLSPGK |
| 334 | — | Cross | artificial | GQPKAAPSVTLFPPSSEELQANKATLVCLISDFYPGAVTVAWKADSSPVKAGVETTTPSKQS |
| | | Lbody 2 | | NNKYAASSYLSLTPEQWKSHRSYSCQVTHEGSTVEKTVAPTECSEPKSSDKTHTCPPCPAPE |
| | | C | | AAGGPSVFLFPPKPKDTLMISRTPEVTCVVVDVSHEDPEVKFNWYVDGVEVHNAKTKPREEQ |
| | | | | YNSTYRVVSVLTVLHQDWLNGKEYKCKVSNKALPAPIEKTISKAKGQPREPQVYTLPPSRKE |
| | | | | MTKNQVSLTCLVKGFYPSDIAVEWESNGQPENNYKTTPPVLKSDGSFFLYSKLTVDKSRWQQ |
| | | | | GNVFSCSVMHEALHNHYTQKSLSLSPGK |
| 335 | — | Hetero-Fc | artificial | DKTHTCPPCPAPELLGGPSVFLFPPKPKDTLMISRTPEVTCVVVDVSHEDPEVKFNWYVDGV |
| | | binder Fc | | EVHNAKTKPCEEQYGSTYRCVSVLTVLHQDWLNGKEYKCKVSNKALPAPIEKTISKAKGQPR |
| | | | | EPQVYTLPPSRKEMTKNQVSLTCLVKGFYPSDIAVEWESNGQPENNYKTTPPVLKSDGSFFL |
| | | | | YSKLTVDKSRWQQGNVFSCSVMHEALHNHYTQKSLSLSPGK |
| 336 | — | Hetero-Fc | artificial | DKTHTCPPCPAPELLGGPSVFLFPPKPKDTLMISRTPEVTCVVVDVSHEDPEVKFNWYVDGV |
| | | partner | | EVHNAKTKPCEEQYGSTYRCVSVLTVLHQDWLNGKEYKCKVSNKALPAPIEKTISKAKGQPR |
| | | Fc | | EPQVYTLPPSREEMTKNQVSLTCLVKGFYPSDIAVEWESNGQPENNYDTTPPVLDSDGSFFL |
| | | | | YSDLTVDKSRWQQGNVFSCSVMHEALHNHYTQKSLSLSPGK |
| 337 | — | Maxi- | artificial | EPKSSDKTHTCPPCPAPELLGGPSVFLFPPKPKDTLMISRTPEVTCVVVDVSHEDPEVKFNW |
| | | body 1 | | YVDGVEVHNAKTKPCEEQYGSTYRCVSVLTVLHQDWLNGKEYKCKVSNKALPAPIEKTISKA |
| | | target Fc | | KGQPREPQVYTLPPSRKEMTKNQVSLTCLVKGFYPSDIAVEWESNGQPENNYKTTPPVLKSD |
| | | | | GSFFLYSKLTVDKSRWQQGNVFSCSVMHEALHNHYTQKSLSLSPGK |
| 338 | — | Maxi- | artificial | EPKSSDKTHTCPPCPAPELLGGPSVFLFPPKPKDTLMISRTPEVTCVVVDVSHEDPEVKFNW |
| | | body 1 | | YVDGVEVHNAKTKPCEEQYGSTYRCVSVLTVLHQDWLNGKEYKCKVSNKALPAPIEKTISKA |
| | | CD3 Fc | | KGQPREPQVYTLPPSREEMTKNQVSLTCLVKGFYPSDIAVEWESNGQPENNYDTTPPVLDSD |
| | | | | GSFFLYSDLTVDKSRWQQGNVFSCSVMHEALHNHYTQKSLSLSPGK |
| 339 | — | Maxi- | artificial | EPKSSDKTHTCPPCPAPEAAGGPSVFLFPPKPKDTLMISRTPEVTCVVVDVSHEDPEVKFNW |
| | | body 2 | | YVDGVEVHNAKTKPREEQYNSTYRVVSVLTVLHQDWLNGKEYKCKVSNKALPAPIEKTISKA |
| | | target Fc | | KGQPREPQVYTLPPSRKEMTKNQVSLTCLVKGFYPSDIAVEWESNGQPENNYKTTPPVLKSD |
| | | | | GSFFLYSKLTVDKSRWQQGNVFSCSVMHEALHNHYTQKSLSLSPGK |
| 340 | — | Maxi- | artificial | EPKSSDKTHTCPPCPAPEAAGGPSVFLFPPKPKDTLMISRTPEVTCVVVDVSHEDPEVKFNW |
| | | body 2 | | YVDGVEVHNAKTKPREEQYNSTYRVVSVLTVLHQDWLNGKEYKCKVSNKALPAPIEKTISKA |
| | | CD3 Fc | | KGQPREPQVYTLPPSREEMTKNQVSLTCLVKGFYPSDIAVEWESNGQPENNYDTTPPVLDSD |
| | | | | GSFFLYSDLTVDKSRWQQGNVFSCSVMHEALHNHYTQKSLSLSPGK |
| 341 | — | Mono Fc | artificial | APELLGGPSVFLFPPKPKDTLMISRTPEVTCVVVDVSHEDPEVKFNWYVDGVEVHNAKTKPR |
| | | | | EEQYNSTYRVVSVLTVLHQDWLNGKEYKCKVSNKALPAPIEKTISKAKGQPREPQVTTLPPS |
| | | | | REEMTKNQVSLTCLVKGFYPSDIAVEWESNGQPENNYDTTPPVLDSDGSFFLYSDLTVDKSR |
| | | | | WQQGNVFSCSVMHEALHNHYTQKSLSLSPGK |
| 342 | — | CDR-L1 | artificial | GSSTGAVTSGYYPN |
| | | of F6A | | |
| 343 | | CDR-L2 | artificial | GTKFLAP |
| | | of F6A | | |
| 344 | | CDR-L3 | artificial | ALWYSNRWV |
| | | of F6A | | |
| 345 | | CDR-H1 | artificial | IYAMN |
| | | of F6A | | |
| 346 | | CDR-H2 | artificial | RIRSKYNNYATYYADSVKS |
| | | of F6A | | |
| 347 | | CDR-H3 | artificial | HGNFGNSYVSFFAY |
| | | of F6A | | |
| 348 | | VH of | artificial | EVQLVESGGGLVQPGGSLKLSCAASGFTFNIYAMNWVRQAPGKGLEWVARIRSKYNNYATYY |
| | | F6A | | ADSVKSRFTISRDDSKNTAYLQMNNLKTEDTAVYYCVRHGNFGNSYVSFFAYWGQGTLVTVS |
| | | | | S |
| 349 | | VL of | artificial | QTVVTQEPSLTVSPGGTVTLTCGSSTGAVTSGYYPNWVQQKPGQAPRGLIGGTKFLAPGTPA |
| | | F6A | | RFSGSLLGGKAALTLSGVQPEDEAEYYCALWYSNRWVFGGGTKLTVL |
| 350 | | VH-VL of | artificial | EVQLVESGGGLVQPGGSLKLSCAASGFTFNIYAMNWVRQAPGKGLEWVARIRSKYNNYATYY |
| | | F6A | | ADSVKSRFTISRDDSKNTAYLQMNNLKTEDTAVYYCVRHGNFGNSYVSFFAYWGQGTLVTVS |
| | | | | SGGGGSGGGGSGGGGSQTVVTQEPSLTVSPGGTVTLTCGSSTGAVTSGYYPNWVQQKPGQAP |
| | | | | RGLIGGTKFLAPGTPARFSGSLLGGKAALTLSGVQPEDEAEYYCALWYSNRWVFGGGTKLTV |
| | | | | L |
| 351 | | CDR-L1 | artificial | GSSTGAVTSGYYPN |
| | | of H2C | | |
| 352 | | CDR-L2 | artificial | GTKFLAP |
| | | of H2C | | |
| 353 | | CDR-L3 | artificial | ALWYSNRWV |
| | | of H2C | | |
| 354 | | CDR-H1 | artificial | KYAMN |
| | | of H2C | | |
| 355 | | CDR-H2 | artificial | RIRSKYNNYATYYADSVKD |
| | | of H2C | | |
| 356 | | CDR-H3 | artificial | HGNFGNSYISYWAY |
| | | of H2C | | |
| 357 | | VH of | artificial | EVQLVESGGGLVQPGGSLKLSCAASGFTFNKYAMNWVRQAPGKGLEWVARIRSKYNNYATYY |
| | | H2C | | ADSVKDRFTISRDDSKNTAYLQMNNLKTEDTAVYYCVRHGNFGNSYISYWAYWGQGTLVTVS |
| | | | | S |
| 358 | | VL of | artificial | QTVVTQEPSLTVSPGGTVTLTCGSSTGAVTSGYYPNWVQQKPGQAPRGLIGGTKFLAPGTPA |
| | | H2C | | RFSGSLLGGKAALTLSGVQPEDEAEYYCALWYSNRWVFGGGTKLTVL |
| 359 | | VH-VL of | artificial | EVQLVESGGGLVQPGGSLKLSCAASGFTFNKYAMNWVRQAPGKGLEWVARIRSKYNNYATYY |
| | | H2C | | ADSVKDRFTISRDDSKNTAYLQMNNLKTEDTAVYYCVRHGNFGNSYISYWAYWGQGTLVTVS |
| | | | | SGGGGSGGGGSGGGGSQTVVTQEPSLTVSPGGTVTLTCGSSTGAVTSGYYPNWVQQKPGQAP |
| | | | | RGLIGGTKFLAPGTPARFSGSLLGGKAALTLSGVQPEDEAEYYCALWYSNRWVFGGGTKLTV |
| | | | | L |
| 360 | | CDR-L1 | artificial | GSSTGAVTSGYYPN |
| | | of H1E | | |
| 361 | | CDR-L2 | artificial | GTKFLAP |
| | | of H1E | | |
| 362 | | CDR-L3 | artificial | ALWYSNRWV |
| | | of H1E | | |
| 363 | | CDR-H1 | artificial | SYAMN |
| | | of H1E | | |
| 364 | | CDR-H2 | artificial | RIRSKYNNYATYYADSVKG |
| | | of H1E | | |
| 365 | | CDR-H3 | artificial | HGNFGNSYLSFWAY |
| | | of H1E | | |
| 366 | | VH of | artificial | EVQLVESGGGLEQPGGSLKLSCAASGFTFNSYAMNWVRQAPGKGLEWVARIRSKYNNYATYY |
| | | H1E | | ADSVKGRFTISRDDSKNTAYLQMNNLKTEDTAVYYCVRHGNFGNSYLSFWAYWGQGTLVTVS |
| | | | | S |
| 367 | | VL of | artificial | QTVVTQEPSLTVSPGGTVTLTCGSSTGAVTSGYYPNWVQQKPGQAPRGLIGGTKFLAPGTPA |
| | | H1E | | RFSGSLLGGKAALTLSGVQPEDEAEYYCALWYSNRWVFGGGTKLTVL |
| 368 | | VH-VL of | artificial | EVQLVESGGGLEQPGGSLKLSCAASGFTFNSYAMNWVRQAPGKGLEWVARIRSKYNNYATYY |
| | | H1E | | ADSVKGRFTISRDDSKNTAYLQMNNLKTEDTAVYYCVRHGNFGNSYLSFWAYWGQGTLVTVS |
| | | | | SGGGGSGGGGSGGGGSQTVVTQEPSLTVSPGGTVTLTCGSSTGAVTSGYYPNWVQQKPGQAP |
| | | | | RGLIGGTKFLAPGTPARFSGSLLGGKAALTLSGVQPEDEAEYYCALWYSNRWVFGGGTKLTV |
| | | | | L |
| 369 | | CDR-L1 | artificial | GSSTGAVTSGYYPN |
| | | of G4H | | |
| 370 | | CDR-L2 | artificial | GTKFLAP |
| | | of G4H | | |
| 371 | | CDR-L3 | artificial | ALWYSNRWV |
| | | of G4H | | |
| 372 | | CDR-H1 | artificial | RYAMN |
| | | of G4H | | |
| 373 | | CDR-H2 | artificial | RIRSKYNNYATYYADSVKG |
| | | of G4H | | |
| 374 | | CDR-H3 | artificial | HGNFGNSYLSYFAY |
| | | of G4H | | |
| 375 | | VH of | artificial | EVQLVESGGGLVQPGGSLKLSCAASGFTFNRYAMNWVRQAPGKGLEWVARIRSKYNNYATYY |
| | | G4H | | ADSVKGRFTISRDDSKNTAYLQMNNLKTEDTAVYYCVRHGNFGNSYLSYFAYWGQGTLVTVS |
| | | | | S |
| 376 | | VL of | artificial | QTVVTQEPSLTVSPGGTVTLTCGSSTGAVTSGYYPNWVQQKPGQAPRGLIGGTKFLAPGTPA |
| | | G4H | | RFSGSLLGGKAALTLSGVQPEDEAEYYCALWYSNRWVFGGGTKLTVL |
| 377 | | VH-VL of | artificial | EVQLVESGGGLVQPGGSLKLSCAASGFTFNRYAMNWVRQAPGKGLEWVARIRSKYNNYATYY |
| | | G4H | | ADSVKGRFTISRDDSKNTAYLQMNNLKTEDTAVYYCVRHGNFGNSYLSYFAYWGQGTLVTVS |
| | | | | SGGGGSGGGGSGGGGSQTVVTQEPSLTVSPGGTVTLTCGSSTGAVTSGYYPNWVQQKPGQAP |
| | | | | RGLIGGTKFLAPGTPARFSGSLLGGKAALTLSGVQPEDEAEYYCALWYSNRWVFGGGTKLTV |
| | | | | L |
| 378 | | CDR-L1 | artificial | RSSTGAVTSGYYPN |
| | | of A2J | | |
| 379 | | CDR-L2 | artificial | ATDMRPS |
| | | of A2J | | |
| 380 | | CDR-L3 | artificial | ALWYSNRWV |
| | | of A2J | | |
| 381 | | CDR-H1 | artificial | VYAMN |
| | | of A2J | | |
| 382 | | CDR-H2 | artificial | RIRSKYNNYATYYADSVKK |
| | | of A2J | | |
| 383 | | CDR-H3 | artificial | HGNFGNSYLSWWAY |
| | | of A2J | | |
| 384 | | VH of A2J | artificial | EVQLVESGGGLVQPGGSLKLSCAASGFTFNVYAMNWVRQAPGKGLEWVARIRSKYNNYATYY |
| | | | | ADSVKKRFTISRDDSKNTAYLQMNNLKTEDTAVYYCVRHGNFGNSYLSWWAYWGQGTLVTVS |
| | | | | S |
| 385 | | VL of A2J | artificial | QTVVTQEPSLTVSPGGTVTLTCRSSTGAVTSGYYPNWVQQKPGQAPRGLIGATDMRPSGTPA |
| | | | | RFSGSLLGGKAALTLSGVQPEDEAEYYCALWYSNRWVFGGGTKLTVL |
| 386 | | VH-VL of | artificial | EVQLVESGGGLVQPGGSLKLSCAASGFTFNVYAMNWVRQAPGKGLEWVARIRSKYNNYATYY |
| | | A2J | | ADSVKKRFTISRDDSKNTAYLQMNNLKTEDTAVYYCVRHGNFGNSYLSWWAYWGQGTLVTVS |
| | | | | SGGGGSGGGGSGGGGSQTVVTQEPSLTVSPGGTVTLTCRSSTGAVTSGYYPNWVQQKPGQAP |
| | | | | RGLIGATDMRPSGTPARFSGSLLGGKAALTLSGVQPEDEAEYYCALWYSNRWVFGGGTKLTV |
| | | | | L |
| 387 | | CDR-L1 | artificial | GSSTGAVTSGYYPN |
| | | of E1L | | |
| 388 | | CDR-L2 | artificial | GTKFLAP |
| | | of E1L | | |
| 389 | | CDR-L3 | artificial | ALWYSNRWV |
| | | of E1L | | |
| 390 | | CDR-H1 | artificial | KYAMN |
| | | of E1L | | |
| 391 | | CDR-H2 | artificial | RIRSKYNNYATYYADSVKS |
| | | of E1L | | |
| 392 | | CDR-H3 | artificial | HGNFGNSYTSYYAY |
| | | of E1L | | |
| 393 | | VH of | artificial | EVQLVESGGGLVQPGGSLKLSCAASGFTFNKYAMNWVRQAPGKGLEWVARIRSKYNNYATYY |
| | | E1L | | ADSVKSRFTISRDDSKNTAYLQMNNLKTEDTAVYYCVRHGNFGNSYTSYYAYWGQGTLVTVS |
| | | | | S |
| 394 | | VL of E1L | artificial | QTVVTQEPSLTVSPGGTVTLTCGSSTGAVTSGYYPNWVQQKPGQAPRGLIGGTKFLAPGTPA |
| | | | | RFSGSLLGGKAALTLSGVQPEDEAEYYCALWYSNRWVFGGGTKLTVL |
| 395 | | VH-VL of | artificial | EVQLVESGGGLVQPGGSLKLSCAASGFTFNKYAMNWVRQAPGKGLEWVARIRSKYNNYATYY |
| | | E1L | | ADSVKSRFTISRDDSKNTAYLQMNNLKTEDTAVYYCVRHGNFGNSYTSYYAYWGQGTLVTVS |
| | | | | SGGGGSGGGGSGGGGSQTVVTQEPSLTVSPGGTVTLTCGSSTGAVTSGYYPNWVQQKPGQAP |
| | | | | RGLIGGTKFLAPGTPARFSGSLLGGKAALTLSGVQPEDEAEYYCALWYSNRWVFGGGTKLTV |
| | | | | L |
| 396 | | CDR-L1 | artificial | RSSTGAVTSGYYPN |
| | | of E2M | | |
| 397 | | CDR-L2 | artificial | ATDMRPS |
| | | of E2M | | |
| 398 | | CDR-L3 | artificial | ALWYSNRWV |
| | | of E2M | | |
| 399 | | CDR-H1 | artificial | GYAMN |
| | | of E2M | | |
| 400 | | CDR-H2 | artificial | RIRSKYNNYATYYADSVKE |
| | | of E2M | | |
| 401 | | CDR-H3 | artificial | HRNFGNSYLSWFAY |
| | | of E2M | | |
| 402 | | VH of | artificial | EVQLVESGGGLVQPGGSLKLSCAASGFTFNGYAMNWVRQAPGKGLEWVARIRSKYNNYATYY |
| | | E2M | | ADSVKERFTISRDDSKNTAYLQMNNLKTEDTAVYYCVRHRNFGNSYLSWFAYWGQGTLVTVS |
| | | | | S |
| 403 | | VL of | artificial | QTVVTQEPSLTVSPGGTVTLTCRSSTGAVTSGYYPNWVQQKPGQAPRGLIGATDMRPSGTPA |
| | | E2M | | RFSGSLLGGKAALTLSGVQPEDEAEYYCALWYSNRWVFGGGTKLTVL |
| 404 | | VH-VL of | artificial | EVQLVESGGGLVQPGGSLKLSCAASGFTFNGYAMNWVRQAPGKGLEWVARIRSKYNNYATYY |
| | | E2M | | ADSVKERFTISRDDSKNTAYLQMNNLKTEDTAVYYCVRHRNFGNSYLSWFAYWGQGTLVTVS |
| | | | | SGGGGSGGGGSGGGGSQTVVTQEPSLTVSPGGTVTLTCRSSTGAVTSGYYPNWVQQKPGQAP |
| | | | | RGLIGATDMRPSGTPARFSGSLLGGKAALTLSGVQPEDEAEYYCALWYSNRWVFGGGTKLTV |
| | | | | L |
| 405 | | CDR-L1 | artificial | GSSTGAVTSGYYPN |
| | | of F7O | | |
| 406 | | CDR-L2 | artificial | GTKFLAP |
| | | of F7O | | |
| 407 | | CDR-L3 | artificial | ALWYSNRWV |
| | | of F7O | | |
| 408 | | CDR-H1 | artificial | VYAMN |
| | | of F7O | | |
| 409 | | CDR-H2 | artificial | RIRSKYNNYATYYADSVKK |
| | | of F7O | | |
| 410 | | CDR-H3 | artificial | HGNFGNSYISWWAY |
| | | of F7O | | |
| 411 | | VH of | artificial | EVQLVESGGGLVQPGGSLKLSCAASGFTFNVYAMNWVRQAPGKGLEWVARIRSKYNNYATYY |
| | | F7O | | ADSVKKRFTISRDDSKNTAYLQMNNLKTEDTAVYYCVRHGNFGNSYISWWAYWGQGTLVTVS |
| | | | | S |
| 412 | | VL of | artificial | QTVVTQEPSLTVSPGGTVTLTCGSSTGAVTSGYYPNWVQQKPGQAPRGLIGGTKFLAPGTPA |
| | | F7O | | RFSGSLLGGKAALTLSGVQPEDEAEYYCALWYSNRWVFGGGTKLTVL |
| 413 | | VH-VL of | artificial | EVQLVESGGGLVQPGGSLKLSCAASGFTFNVYAMNWVRQAPGKGLEWVARIRSKYNNYATYY |
| | | F7O | | ADSVKKRFTISRDDSKNTAYLQMNNLKTEDTAVYYCVRHGNFGNSYISWWAYWGQGTLVTVS |
| | | | | SGGGGSGGGGSGGGGSQTVVTQEPSLTVSPGGTVTLTCGSSTGAVTSGYYPNWVQQKPGQAP |
| | | | | RGLIGGTKFLAPGTPARFSGSLLGGKAALTLSGVQPEDEAEYYCALWYSNRWVFGGGTKLTV |
| | | | | L |
| 414 | | CDR-L1 | artificial | GSSTGAVTSGNYPN |
| | | of F12Q | | |
| 415 | | CDR-L2 | artificial | GTKFLAP |
| | | of F12Q | | |
| 416 | | CDR-L3 | artificial | VLWYSNRWV |
| | | of F12Q | | |
| 417 | | CDR-H1 | artificial | SYAMN |
| | | of F12Q | | |
| 418 | | CDR-H2 | artificial | RIRSKYNNYATYYADSVKG |
| | | of F12Q | | |
| 419 | | CDR-H3 | artificial | HGNFGNSYVSWWAY |
| | | of F12Q | | |
| 420 | | VH of | artificial | EVQLVESGGGLVQPGGSLKLSCAASGFTFNSYAMNWVRQAPGKGLEWVARIRSKYNNYATYY |
| | | F12Q | | ADSVKGRFTISRDDSKNTAYLQMNNLKTEDTAVYYCVRHGNFGNSYVSWWAYWGQGTLVTVS |
| | | | | S |
| 421 | | VL of | artificial | QTVVTQEPSLTVSPGGTVTLTCGSSTGAVTSGNYPNWVQQKPGQAPRGLIGGTKFLAPGTPA |
| | | F12Q | | RFSGSLLGGKAALTLSGVQPEDEAEYYCVLWYSNRWVFGGGTKLTVL |
| 422 | | VH-VL of | artificial | EVQLVESGGGLVQPGGSLKLSCAASGFTFNSYAMNWVRQAPGKGLEWVARIRSKYNNYATYY |
| | | F12Q | | ADSVKGRFTISRDDSKNTAYLQMNNLKTEDTAVYYCVRHGNFGNSYVSWWAYWGQGTLVTVS |
| | | | | SGGGGSGGGGSGGGGSQTVVTQEPSLTVSPGGTVTLTCGSSTGAVTSGNYPNWVQQKPGQAP |
| | | | | RGLIGGTKFLAPGTPARFSGSLLGGKAALTLSGVQPEDEAEYYCVLWYSNRWVFGGGTKLTV |
| | | | | L |
| 423 | | CDR-L1 | artificial | GSSTGAVTSGNYPN |
| | | of I2C | | |
| 424 | | CDR-L2 | artificial | GTKFLAP |
| | | of I2C | | |
| 425 | | CDR-L3 | artificial | VLWYSNRWV |
| | | of I2C | | |
| 426 | | CDR-H1 | artificial | KYAMN |
| | | of I2C | | |
| 427 | | CDR-H2 | artificial | RIRSKYNNYATYYADSVKD |
| | | of I2C | | |
| 428 | | CDR-H3 | artificial | HGNFGNSYISYWAY |
| | | of I2C | | |
| 429 | | VH of I2C | artificial | EVQLVESGGGLVQPGGSLKLSCAASGFTFNKYAMNWVRQAPGKGLEWVARIRSKYNNYATYY |
| | | | | ADSVKDRFTISRDDSKNTAYLQMNNLKTEDTAVYYCVRHGNFGNSYISYWAYWGQGTLVTVS |
| | | | | S |
| 430 | | VL of I2C | artificial | QTVVTQEPSLTVSPGGTVTLTCGSSTGAVTSGNYPNWVQQKPGQAPRGLIGGTKFLAPGTPA |
| | | | | RFSGSLLGGKAALTLSGVQPEDEAEYYCVLWYSNRWVFGGGTKLTVL |
| 431 | | VH-VL of | artificial | EVQLVESGGGLVQPGGSLKLSCAASGFTFNKYAMNWVRQAPGKGLEWVARIRSKYNNYATYY |
| | | I2C | | ADSVKDRFTISRDDSKNTAYLQMNNLKTEDTAVYYCVRHGNFGNSYISYWAYWGQGTLVTVS |
| | | | | SGGGGSGGGGSGGGGSQTVVTQEPSLTVSPGGTVTLTCGSSTGAVTSGNYPNWVQQKPGQAP |
| | | | | RGLIGGTKFLAPGTPARFSGSLLGGKAALTLSGVQPEDEAEYYCVLWYSNRWVFGGGTKLTV |
| | | | | L |
| 432 | | VH of | artificial | EVQLVESGGGLVQPGGSLRLSCAASGFTFNSYAMNWVRQAPGKGLEWVARIRSKYNNYATYY |
| | | F12q | | ADSVKGRFTISRDDSKNTAYLQMNSLKTEDTAVYYCVRHGNFGNSYVSWWAYWGQGTLVTVS |
| | | | | S |
| 433 | | VL of | artificial | QTVVTQEPSLTVSPGGTVTLTCGSSTGAVTSGNYPNWVQQKPGQAPRGLIGGTKFLAPGTPA |
| | | F12q | | RFSGSLLGGKAALTLSGVQPEDEAEYYCVLWYSNRWVFGGGTKLTVL |
| 434 | | VHVL of | artificial | EVQLVESGGGLVQPGGSLRLSCAASGFTFNSYAMNWVRQAPGKGLEWVARIRSKYNNYATYY |
| | | F12q | | ADSVKGRFTISRDDSKNTAYLQMNSLKTEDTAVYYCVRHGNFGNSYVSWWAYWGQGTLVTVS |
| | | | | SGGGGSGGGGSGGGGSQTVVTQEPSLTVSPGGTVTLTCGSSTGAVTSGNYPNWVQQKPGQAP |
| | | | | RGLIGGTKFLAPGTPARFSGSLLGGKAALTLSGVQPEDEAEYYCVLWYSNRWVFGGGTKLTV |
| | | | | L |
| 435 | | DLL3-4- | VH | QVQLQESGPGLVKPSETLSLTCTVSGGSISSYYWSWIRQPPGKCLEWIGYVYYSGTTNYNPS |
| | | 001 | | LKSRVTISVDTSKNQFSLKLSSVTAADTAVYYCASIAVTGFYFDYWGQGTLVTVSS |
| | | (G44C) | | |
| 436 | | DLL3-4- | VL | EIVLTQSPGTLSLSPGERVTLSCRASQRVNNNYLAWYQQRPGQAPRLLIYGASSRATGIPDR |
| | | 001 | | FSGSGSGTDFTLTISRLEPEDFAVYYCQQYDRSPLTFGCGTKLEIK |
| | | (G234C) | | |
| 437 | | DLL3-4- | scFv | QVQLQESGPGLVKPSETLSLTCTVSGGSISSYYWSWIRQPPGKCLEWIGYVYYSGTTNYNPS |
| | | 001 | | LKSRVTISVDTSKNQFSLKLSSVTAADTAVYYCASIAVTGFYFDYWGQGTLVTVSSGGGGSG |
| | | (G44C- | | GGGSGGGGSEIVLTQSPGTLSLSPGERVTLSCRASQRVNNNYLAWYQQRPGQAPRLLIYGAS |
| | | G243C) | | SRATGIPDRFSGSGSGTDFTLTISRLEPEDFAVYYCQQYDRSPLTFGCGTKLEIK |
| 438 | | DLL3-4- | bispecific | QVQLQESGPGLVKPSETLSLTCTVSGGSISSYYWSWIRQPPGKCLEWIGYVYYSGTTNYNPS |
| | | 001 (CC) | molecule | LKSRVTISVDTSKNQFSLKLSSVTAADTAVYYCASIAVTGFYFDYWGQGTLVTVSSGGGGSG |
| | | xI2C | | GGGSGGGGSEIVLTQSPGTLSLSPGERVTLSCRASQRVNNNYLAWYQQRPGQAPRLLIYGAS |
| | | | | SRATGIPDRFSGSGSGTDFTLTISRLEPEDFAVYYCQQYDRSPLTFGCGTKLEIKSGGGGSE |
| | | | | VQLVESGGGLVQPGGSLKLSCAASGFTFNKYAMNWVRQAPGKGLEWVARIRSKYNNYATYYA |
| | | | | DSVKDRFTISRDDSKNTAYLQMNNLKTEDTAVYYCVRHGNFGNSYISYWAYWGQGTLVTVSS |
| | | | | GGGGSGGGGSGGGGSQTVVTQEPSLTVSPGGTVTLTCGSSTGAVTSGNYPNWVQQKPGQAPR |
| | | | | GLIGGTKFLAPGTPARFSGSLLGGKAALTLSGVQPEDEAEYYCVLWYSNRWVFGGGTKLTVL |
| 439 | | DLL3-14- | VH-CDR2 | IINPSEGSTSYAQKFQG |
| | | D55E | | |
| 440 | | DLL3-14- | VH-CDR2 | IINPSDASTSYAQKFQG |
| | | G56A | | |
| 441 | | DLL3-14- | VL-CDR1 | RSSQSLVYREGNTYLS |
| | | D171E | | |
| 442 | | DLL3-14- | VL-CDR1 | RSSQSLVYRDANTYLS |
| | | G172A | | |
| 443 | | DLL3-14- | VL-CDR1 | RSSQSLVYRDGQTYLS |
| | | N173Q | | |
| 444 | | DLL3-14- | VL-CDR1 | RSSQSLVYRDGNAYLS |
| | | T174A | | |
| 445 | | DLL3-14- | VH | QVQLVQSGAEVKKPGASVKVSCKASGYTFTNYYMHWVRQAPGQGLEWMGIINPSDGSTSYAQ |
| | | L43Q | | KFQGRVTMTRDTSTNTVYMDLSSLRSEDTAVYYCARGGNSAFYSYYDMDVWGQGTTVTVSS |
| 446 | | DLL3-14- | VH | QVQLVQSGAEVKKPGASVKVSCKASGYTFTNYYMHWVRQAPGLGLEWMGIINPSEGSTSYAQ |
| | | D55E | | KFQGRVTMTRDTSTNTVYMDLSSLRSEDTAVYYCARGGNSAFYSYYDMDVWGQGTTVTVSS |
| 447 | | DLL3-14- | VH | QVQLVQSGAEVKKPGASVKVSCKASGYTFTNYYMHWVRQAPGLGLEWMGIINPSDASTSYAQ |
| | | G56A | | KFQGRVTMTRDTSTNTVYMDLSSLRSEDTAVYYCARGGNSAFYSYYDMDVWGQGTTVTVSS |
| 448 | | DLL3-14- | VH | QVQLVQSGAEVKKPGASVKVSCKASGYTFTNYYMHWVRQAPGQGLEWMGIINPSEGSTSYAQ |
| | | L43Q- | | KFQGRVTMTRDTSTNTVYMDLSSLRSEDTAVYYCARGGNSAFYSYYDMDVWGQGTTVTVSS |
| | | D55E | | |
| 449 | | DLL3-14- | VH | QVQLVQSGAEVKKPGASVKVSCKASGYTFTNYYMHWVRQAPGQGLEWMGIINPSDASTSYAQ |
| | | L43Q- | | KFQGRVTMTRDTSTNTVYMDLSSLRSEDTAVYYCARGGNSAFYSYYDMDVWGQGTTVTVS |
| | | G56A | | |
| 450 | | DLL3-14- | VH | QVQLVQSGAEVKKPGASVKVSCKASGYTFTNYYMHWVRQAPGLCLEWMGIINPSDGSTSYAQ |
| | | G44C | | KFQGRVTMTRDTSTNTVYMDLSSLRSEDTAVYYCARGGNSAFYSYYDMDVWGQGTTVTVSS |
| 451 | | DLL3-14- | VH | QVQLVQSGAEVKKPGASVKVSCKASGYTFTNYYMHWVRQAPGQCLEWMGIINPSDGSTSYAQ |
| | | L43Q- | | KFQGRVTMTRDTSTNTVYMDLSSLRSEDTAVYYCARGGNSAFYSYYDMDVWGQGTTVTVSS |
| | | G44C | | |
| 452 | | DLL3-14- | VH | QVQLVQSGAEVKKPGASVKVSCKASGYTFTNYYMHWVRQAPGLCLEWMGIINPSEGSTSYAQ |
| | | G44C- | | KFQGRVTMTRDTSTNTVYMDLSSLRSEDTAVYYCARGGNSAFYSYYDMDVWGQGTTVTVSS |
| | | D55E | | |
| 453 | | DLL3-14- | VH | QVQLVQSGAEVKKPGASVKVSCKASGYTFTNYYMHWVRQAPGLCLEWMGIINPSDASTSYAQ |
| | | G44C- | | KFQGRVTMTRDTSTNTVYMDLSSLRSEDTAVYYCARGGNSAFYSYYDMDVWGQGTTVTVSS |
| | | G56A | | |
| 454 | | DLL3-14- | VH | |
| | | L43Q- | | QVQLVQSGAEVKKPGASVKVSCKASGYTFTNYYMHWVRQAPGQCLEWMGIINPSEGSTSYAQ |
| | | G44C- | | KFQGRVTMTRDTSTNTVYMDLSSLRSEDTAVYYCARGGNSAFYSYYDMDVWGQGTTVTVSS |
| | | D55E | | |
| 455 | | DLL3-14- | VH | |
| | | L43Q- | | QVQLVQSGAEVKKPGASVKVSCKASGYTFTNYYMHWVRQAPGQCLEWMGIINPSDASTSYAQ |
| | | G44C- | | KFQGRVTMTRDTSTNTVYMDLSSLRSEDTAVYYCARGGNSAFYSYYDMDVWGQGTTVTVSS |
| | | G56A | | |
| 456 | | DLL3-14- | VL | DVVMTQTPLSLPVTLGQPASISCRSSQSLVYREGNTYLSWFQQRPGQSPRRLIYKVSNWQSG |
| | | D171E | | VPDRFSGGGSGTDFTLKISRVEAEDVGVYYCMQGTHWPPTFGQGTKVEIK |
| 457 | | DLL3-14- | VL | DVVMTQTPLSLPVTLGQPASISCRSSQSLVYRDANTYLSWFQQRPGQSPRRLIYKVSNWQSG |
| | | G172A | | VPDRFSGGGSGTDFTLKISRVEAEDVGVYYCMQGTHWPPTFGQGTKVEIK |
| 458 | | DLL3-14- | VL | DVVMTQTPLSLPVTLGQPASISCRSSQSLVYRDGQTYLSWFQQRPGQSPRRLIYKVSNWQSG |
| | | N173Q | | VPDRFSGGGSGTDFTLKISRVEAEDVGVYYCMQGTHWPPTFGQGTKVEIK |
| 459 | | DLL3-14- | VL | DVVMTQTPLSLPVTLGQPASISCRSSQSLVYRDGNAYLSWFQQRPGQSPRRLIYKVSNWQSG |
| | | T174A | | VPDRFSGGGSGTDFTLKISRVEAEDVGVYYCMQGTHWPPTFGQGTKVEIK |
| 460 | | DLL3-14- | VL | DVVMTQTPLSLPVTLGQPASISCRSSQSLVYRDGNTYLSWFQQRPGQSPRRLIYKVSNWQSG |
| | | G208S | | VPDRFSGSGSGTDFTLKISRVEAEDVGVYYCMQGTHWPPTFGQGTKVEIK |
| 461 | | DLL3-14- | VL | DVVMTQTPLSLPVTLGQPASISCRSSQSLVYREGNTYLSWFQQRPGQSPRRLIYKVSNWQSG |
| | | D171E- | | VPDRFSGSGSGTDFTLKISRVEAEDVGVYYCMQGTHWPPTFGQGTKVEIK |
| | | G208S | | |
| 462 | | DLL3-14- | VL | DVVMTQTPLSLPVTLGQPASISCRSSQSLVYRDANTYLSWFQQRPGQSPRRLIYKVSNWQSG |
| | | G172A- | | VPDRFSGSGSGTDFTLKISRVEAEDVGVYYCMQGTHWPPTFGQGTKVEIK |
| | | G208S | | |
| 463 | | DLL3-14- | VL | DVVMTQTPLSLPVTLGQPASISCRSSQSLVYRDGNTYLSWFQQRPGQSPRRLIYKVSNWQSG |
| | | Q243C | | VPDRFSGGGSGTDFTLKISRVEAEDVGVYYCMQGTHWPPTFGCGTKVEIK |
| 464 | | DLL3-14- | VL | DVVMTQTPLSLPVTLGQPASISCRSSQSLVYREGNTYLSWFQQRPGQSPRRLIYKVSNWQSG |
| | | D171E- | | VPDRFSGGGSGTDFTLKISRVEAEDVGVYYCMQGTHWPPTFGCGTKVEIK |
| | | Q243C | | |
| 465 | | DLL3-14- | VL | DVVMTQTPLSLPVTLGQPASISCRSSQSLVYRDANTYLSWFQQRPGQSPRRLIYKVSNWQSG |
| | | G172A- | | VPDRFSGGGSGTDFTLKISRVEAEDVGVYYCMQGTHWPPTFGCGTKVEIK |
| | | Q243C | | |
| 466 | | DLL3-14- | VL | DVVMTQTPLSLPVTLGQPASISCRSSQSLVYRDGQTYLSWFQQRPGQSPRRLIYKVSNWQSG |
| | | N173Q | | VPDRFSGGGSGTDFTLKISRVEAEDVGVYYCMQGTHWPPTFGCGTKVEIK |
| | | Q243C | | |
| 467 | | DLL3-14- | VL | DVVMTQTPLSLPVTLGQPASISCRSSQSLVYRDGNAYLSWFQQRPGQSPRRLIYKVSNWQSG |
| | | T174A- | | VPDRFSGGGSGTDFTLKISRVEAEDVGVYYCMQGTHWPPTFGCGTKVEIK |
| | | Q243C | | |
| 468 | | DLL3-14- | VL | DVVMTQTPLSLPVTLGQPASISCRSSQSLVYRDGNTYLSWFQQRPGQSPRRLIYKVSNWQSG |
| | | G208S- | | VPDRFSGSGSGTDFTLKISRVEAEDVGVYYCMQGTHWPPTFGCGTKVEIK |
| | | Q243C | | |
| 469 | | DLL3-14- | VL | DVVMTQTPLSLPVTLGQPASISCRSSQSLVYREGNTYLSWFQQRPGQSPRRLIYKVSNWQSG |
| | | D171E- | | VPDRFSGSGSGTDFTLKISRVEAEDVGVYYCMQGTHWPPTFGCGTKVEIK |
| | | G208S- | | |
| | | Q243C | | |
| 470 | | DLL3-14- | VL | DVVMTQTPLSLPVTLGQPASISCRSSQSLVYRDANTYLSWFQQRPGQSPRRLIYKVSNWQSG |
| | | G172A- | | VPDRFSGSGSGTDFTLKISRVEAEDVGVYYCMQGTHWPPTFGCGTKVEIK |
| | | G208S- | | |
| | | Q243C | | |
| 471 | | DLL3-14- | scFv | QVQLVQSGAEVKKPGASVKVSCKASGYTFTNYYMHWVRQAPGLGLEWMGIINPSDGSTSYAQ |
| | | 001 | | KFQGRVTMTRDTSTNTVYMDLSSLRSEDTAVYYCARGGNSAFYSYYDMDVWGQGTTVTVSSG |
| | | | | GGGSGGGGSGGGGSDVVMTQTPLSLPVTLGQPASISCRSSQSLVYREGNTYLSWFQQRPGQS |
| | | | | PRRLIYKVSNWQSGVPDRFSGGGSGTDFTLKISRVEAEDVGVYYCMQGTHWPPTFGQGTKVE |
| | | | | IK |
| 472 | | DLL3-14- | scFv | QVQLVQSGAEVKKPGASVKVSCKASGYTFTNYYMHWVRQAPGLGLEWMGIINPSDGSTSYAQ |
| | | 002 | | KFQGRVTMTRDTSTNTVYMDLSSLRSEDTAVYYCARGGNSAFYSYYDMDVWGQGTTVTVSSG |
| | | | | GGGSGGGGSGGGGSDVVMTQTPLSLPVTLGQPASISCRSSQSLVYRDANTYLSWFQQRPGQS |
| | | | | PRRLIYKVSNWQSGVPDRFSGGGSGTDFTLKISRVEAEDVGVYYCMQGTHWPPTFGQGTKVE |
| | | | | IK |
| 473 | | DLL3-14- | scFv | QVQLVQSGAEVKKPGASVKVSCKASGYTFTNYYMHWVRQAPGLGLEWMGIINPSDGSTSYAQ |
| | | 003 | | KFQGRVTMTRDTSTNTVYMDLSSLRSEDTAVYYCARGGNSAFYSYYDMDVWGQGTTVTVSSG |
| | | | | GGGSGGGGSGGGGSDVVMTQTPLSLPVTLGQPASISCRSSQSLVYRDGQTYLSWFQQRPGQS |
| | | | | PRRLIYKVSNWQSGVPDRFSGGGSGTDFTLKISRVEAEDVGVYYCMQGTHWPPTFGQGTKVE |
| | | | | IK |
| 474 | | DLL3-14- | scFv | QVQLVQSGAEVKKPGASVKVSCKASGYTFTNYYMHWVRQAPGLGLEWMGIINPSDGSTSYAQ |
| | | 004 | | KFQGRVTMTRDTSTNTVYMDLSSLRSEDTAVYYCARGGNSAFYSYYDMDVWGQGTTVTVSSG |
| | | | | GGGSGGGGSGGGGSDVVMTQTPLSLPVTLGQPASISCRSSQSLVYRDGNAYLSWFQQRPGQS |
| | | | | PRRLIYKVSNWQSGVPDRFSGGGSGTDFTLKISRVEAEDVGVYYCMQGTHWPPTFGQGTKVE |
| | | | | IK |
| 475 | | DLL3-14- | scFv | QVQLVQSGAEVKKPGASVKVSCKASGYTFTNYYMHWVRQAPGLGLEWMGIINPSDGSTSYAQ |
| | | 005 | | KFQGRVTMTRDTSTNTVYMDLSSLRSEDTAVYYCARGGNSAFYSYYDMDVWGQGTTVTVSSG |
| | | | | GGGSGGGGSGGGGSDVVMTQTPLSLPVTLGQPASISCRSSQSLVYRDGNTYLSWFQQRPGQS |
| | | | | PRRLIYKVSNWQSGVPDRFSGSGSGTDFTLKISRVEAEDVGVYYCMQGTHWPPTFGQGTKVE |
| | | | | IK |
| 476 | | DLL3-14- | scFv | QVQLVQSGAEVKKPGASVKVSCKASGYTFTNYYMHWVRQAPGQGLEWMGIINPSDGSTSYAQ |
| | | 006 | | KFQGRVTMTRDTSTNTVYMDLSSLRSEDTAVYYCARGGNSAFYSYYDMDVWGQGTTVTVSSG |
| | | | | GGGSGGGGSGGGGSDVVMTQTPLSLPVTLGQPASISCRSSQSLVYRDGNTYLSWFQQRPGQS |
| | | | | PRRLIYKVSNWQSGVPDRFSGGGSGTDFTLKISRVEAEDVGVYYCMQGTHWPPTFGQGTKVE |
| | | | | IK |
| 477 | | DLL3-14- | scFv | QVQLVQSGAEVKKPGASVKVSCKASGYTFTNYYMHWVRQAPGLGLEWMGIINPSEGSTSYAQ |
| | | 007 | | KFQGRVTMTRDTSTNTVYMDLSSLRSEDTAVYYCARGGNSAFYSYYDMDVWGQGTTVTVSSG |
| | | | | GGGSGGGGSGGGGSDVVMTQTPLSLPVTLGQPASISCRSSQSLVYRDGNTYLSWFQQRPGQS |
| | | | | PRRLIYKVSNWQSGVPDRFSGGGSGTDFTLKISRVEAEDVGVYYCMQGTHWPPTFGQGTKVE |
| | | | | IK |
| 478 | | DLL3-14- | scFv | QVQLVQSGAEVKKPGASVKVSCKASGYTFTNYYMHWVRQAPGLGLEWMGIINPSDASTSYAQ |
| | | 008 | | KFQGRVTMTRDTSTNTVYMDLSSLRSEDTAVYYCARGGNSAFYSYYDMDVWGQGTTVTVSSG |
| | | | | GGGSGGGGSGGGGSDVVMTQTPLSLPVTLGQPASISCRSSQSLVYRDGNTYLSWFQQRPGQS |
| | | | | PRRLIYKVSNWQSGVPDRFSGGGSGTDFTLKISRVEAEDVGVYYCMQGTHWPPTFGQGTKVE |
| | | | | IK |
| 479 | | DLL3-14- | scFv | QVQLVQSGAEVKKPGASVKVSCKASGYTFTNYYMHWVRQAPGQGLEWMGIINPSDGSTSYAQ |
| | | 009 | | KFQGRVTMTRDTSTNTVYMDLSSLRSEDTAVYYCARGGNSAFYSYYDMDVWGQGTTVTVSSG |
| | | | | GGGSGGGGSGGGGSDVVMTQTPLSLPVTLGQPASISCRSSQSLVYRDGNTYLSWFQQRPGQS |
| | | | | PRRLIYKVSNWQSGVPDRFSGSGSGTDFTLKISRVEAEDVGVYYCMQGTHWPPTFGQGTKVE |
| | | | | IK |
| 480 | | DLL3-14- | scFv | QVQLVQSGAEVKKPGASVKVSCKASGYTFTNYYMHWVRQAPGQGLEWMGIINPSEGSTSYAQ |
| | | 010 | | KFQGRVTMTRDTSTNTVYMDLSSLRSEDTAVYYCARGGNSAFYSYYDMDVWGQGTTVTVSSG |
| | | | | GGGSGGGGSGGGGSDVVMTQTPLSLPVTLGQPASISCRSSQSLVYREGNTYLSWFQQRPGQS |
| | | | | PRRLIYKVSNWQSGVPDRFSGSGSGTDFTLKISRVEAEDVGVYYCMQGTHWPPTFGQGTKVE |
| | | | | IK |
| 481 | | DLL3-14- | scFv | QVQLVQSGAEVKKPGASVKVSCKASGYTFTNYYMHWVRQAPGQGLEWMGIINPSDASTSYAQ |
| | | 011 | | KFQGRVTMTRDTSTNTVYMDLSSLRSEDTAVYYCARGGNSAFYSYYDMDVWGQGTTVTVSSG |
| | | | | GGGSGGGGSGGGGSDVVMTQTPLSLPVTLGQPASISCRSSQSLVYRDANTYLSWFQQRPGQS |
| | | | | PRRLIYKVSNWQSGVPDRFSGSGSGTDFTLKISRVEAEDVGVYYCMQGTHWPPTFGQGTKVE |
| | | | | IK |
| 482 | | DLL3-14- | scFv | QVQLVQSGAEVKKPGASVKVSCKASGYTFTNYYMHWVRQAPGLCLEWMGIINPSDGSTSYAQ |
| | | 012 (CC) | | KFQGRVTMTRDTSTNTVYMDLSSLRSEDTAVYYCARGGNSAFYSYYDMDVWGQGTTVTVSSG |
| | | | | GGGSGGGGSGGGGSDVVMTQTPLSLPVTLGQPASISCRSSQSLVYRDGNTYLSWFQQRPGQS |
| | | | | PRRLIYKVSNWQSGVPDRFSGGGSGTDFTLKISRVEAEDVGVYYCMQGTHWPPTFGCGTKVE |
| | | | | IK |
| 483 | | DLL3-14- | scFv | QVQLVQSGAEVKKPGASVKVSCKASGYTFTNYYMHWVRQAPGLCLEWMGIINPSDGSTSYAQ |
| | | 013 | | KFQGRVTMTRDTSTNTVYMDLSSLRSEDTAVYYCARGGNSAFYSYYDMDVWGQGTTVTVSSG |
| | | | | GGGSGGGGSGGGGSDVVMTQTPLSLPVTLGQPASISCRSSQSLVYREGNTYLSWFQQRPGQS |
| | | | | PRRLIYKVSNWQSGVPDRFSGGGSGTDFTLKISRVEAEDVGVYYCMQGTHWPPTFGCGTKVE |
| | | | | IK |
| 484 | | DLL3-14- | scFv | QVQLVQSGAEVKKPGASVKVSCKASGYTFTNYYMHWVRQAPGLCLEWMGIINPSDGSTSYAQ |
| | | 014 | | KFQGRVTMTRDTSTNTVYMDLSSLRSEDTAVYYCARGGNSAFYSYYDMDVWGQGTTVTVSSG |
| | | | | GGGSGGGGSGGGGSDVVMTQTPLSLPVTLGQPASISCRSSQSLVYRDANTYLSWFQQRPGQS |
| | | | | PRRLIYKVSNWQSGVPDRFSGGGSGTDFTLKISRVEAEDVGVYYCMQGTHWPPTFGCGTKVE |
| | | | | IK |
| 485 | | DLL3-14- | scFv | QVQLVQSGAEVKKPGASVKVSCKASGYTFTNYYMHWVRQAPGLCLEWMGIINPSDGSTSYAQ |
| | | 015 | | KFQGRVTMTRDTSTNTVYMDLSSLRSEDTAVYYCARGGNSAFYSYYDMDVWGQGTTVTVSSG |
| | | | | GGGSGGGGSGGGGSDVVMTQTPLSLPVTLGQPASISCRSSQSLVYRDGQTYLSWFQQRPGQS |
| | | | | PRRLIYKVSNWQSGVPDRFSGGGSGTDFTLKISRVEAEDVGVYYCMQGTHWPPTFGCGTKVE |
| | | | | IK |
| 486 | | DLL3-14- | scFv | QVQLVQSGAEVKKPGASVKVSCKASGYTFTNYYMHWVRQAPGLCLEWMGIINPSDGSTSYAQ |
| | | 016 | | KFQGRVTMTRDTSTNTVYMDLSSLRSEDTAVYYCARGGNSAFYSYYDMDVWGQGTTVTVSSG |
| | | | | GGGSGGGGSGGGGSDVVMTQTPLSLPVTLGQPASISCRSSQSLVYRDGNAYLSWFQQRPGQS |
| | | | | PRRLIYKVSNWQSGVPDRFSGGGSGTDFTLKISRVEAEDVGVYYCMQGTHWPPTFGCGTKVE |
| | | | | IK |
| 487 | | DLL3-14- | scFv | QVQLVQSGAEVKKPGASVKVSCKASGYTFTNYYMHWVRQAPGLCLEWMGIINPSDGSTSYAQ |
| | | 017 | | KFQGRVTMTRDTSTNTVYMDLSSLRSEDTAVYYCARGGNSAFYSYYDMDVWGQGTTVTVSSG |
| | | | | GGGSGGGGSGGGGSDVVMTQTPLSLPVTLGQPASISCRSSQSLVYRDGNTYLSWFQQRPGQS |
| | | | | PRRLIYKVSNWQSGVPDRFSGSGSGTDFTLKISRVEAEDVGVYYCMQGTHWPPTFGCGTKVE |
| | | | | IK |
| 488 | | DLL3-14- | scFv | QVQLVQSGAEVKKPGASVKVSCKASGYTFTNYYMHWVRQAPGQCLEWMGIINPSDGSTSYAQ |
| | | 018 | | KFQGRVTMTRDTSTNTVYMDLSSLRSEDTAVYYCARGGNSAFYSYYDMDVWGQGTTVTVSSG |
| | | | | GGGSGGGGSGGGGSDVVMTQTPLSLPVTLGQPASISCRSSQSLVYRDGNTYLSWFQQRPGQS |
| | | | | PRRLIYKVSNWQSGVPDRFSGGGSGTDFTLKISRVEAEDVGVYYCMQGTHWPPTFGCGTKVE |
| | | | | IK |
| 489 | | DLL3-14- | scFv | QVQLVQSGAEVKKPGASVKVSCKASGYTFTNYYMHWVRQAPGLCLEWMGIINPSEGSTSYAQ |
| | | 019 | | KFQGRVTMTRDTSTNTVYMDLSSLRSEDTAVYYCARGGNSAFYSYYDMDVWGQGTTVTVSSG |
| | | | | GGGSGGGGSGGGGSDVVMTQTPLSLPVTLGQPASISCRSSQSLVYRDGNTYLSWFQQRPGQS |
| | | | | PRRLIYKVSNWQSGVPDRFSGGGSGTDFTLKISRVEAEDVGVYYCMQGTHWPPTFGCGTKVE |
| | | | | IK |
| 490 | | DLL3-14- | scFv | QVQLVQSGAEVKKPGASVKVSCKASGYTFTNYYMHWVRQAPGLCLEWMGIINPSDASTSYAQ |
| | | 020 | | KFQGRVTMTRDTSTNTVYMDLSSLRSEDTAVYYCARGGNSAFYSYYDMDVWGQGTTVTVSSG |
| | | | | GGGSGGGGSGGGGSDVVMTQTPLSLPVTLGQPASISCRSSQSLVYRDGNTYLSWFQQRPGQS |
| | | | | PRRLIYKVSNWQSGVPDRFSGGGSGTDFTLKISRVEAEDVGVYYCMQGTHWPPTFGCGTKVE |
| | | | | IK |
| 491 | | DLL3-14- | scFv | QVQLVQSGAEVKKPGASVKVSCKASGYTFTNYYMHWVRQAPGQCLEWMGIINPSDGSTSYAQ |
| | | 021 | | KFQGRVTMTRDTSTNTVYMDLSSLRSEDTAVYYCARGGNSAFYSYYDMDVWGQGTTVTVSSG |
| | | | | GGGSGGGGSGGGGSDVVMTQTPLSLPVTLGQPASISCRSSQSLVYRDGNTYLSWFQQRPGQS |
| | | | | PRRLIYKVSNWQSGVPDRFSGSGSGTDFTLKISRVEAEDVGVYYCMQGTHWPPTFGCGTKVE |
| | | | | IK |
| 492 | | DLL3-14- | scFv | QVQLVQSGAEVKKPGASVKVSCKASGYTFTNYYMHWVRQAPGQCLEWMGIINPSEGSTSYAQ |
| | | 022 | | KFQGRVTMTRDTSTNTVYMDLSSLRSEDTAVYYCARGGNSAFYSYYDMDVWGQGTTVTVSSG |
| | | | | GGGSGGGGSGGGGSDVVMTQTPLSLPVTLGQPASISCRSSQSLVYREGNTYLSWFQQRPGQS |
| | | | | PRRLIYKVSNWQSGVPDRFSGSGSGTDFTLKISRVEAEDVGVYYCMQGTHWPPTFGCGTKVE |
| | | | | IK |
| 493 | | DLL3-14- | scFv | QVQLVQSGAEVKKPGASVKVSCKASGYTFTNYYMHWVRQAPGQCLEWMGIINPSDASTSYAQ |
| | | 023 | | KFQGRVTMTRDTSTNTVYMDLSSLRSEDTAVYYCARGGNSAFYSYYDMDVWGQGTTVTVSSG |
| | | | | GGGSGGGGSGGGGSDVVMTQTPLSLPVTLGQPASISCRSSQSLVYRDANTYLSWFQQRPGQS |
| | | | | PRRLIYKVSNWQSGVPDRFSGSGSGTDFTLKISRVEAEDVGVYYCMQGTHWPPTFGCGTKVE |
| | | | | IK |
| 494 | | DLL3-14- | bispecific | QVQLVQSGAEVKKPGASVKVSCKASGYTFTNYYMHWVRQAPGLGLEWMGIINPSDGSTSYAQ |
| | | 001 xI2C | molecule | KFQGRVTMTRDTSTNTVYMDLSSLRSEDTAVYYCARGGNSAFYSYYDMDVWGQGTTVTVSSG |
| | | | | GGGSGGGGSGGGGSDVVMTQTPLSLPVTLGQPASISCRSSQSLVYREGNTYLSWFQQRPGQS |
| | | | | PRRLIYKVSNWQSGVPDRFSGGGSGTDFTLKISRVEAEDVGVYYCMQGTHWPPTFGQGTKVE |
| | | | | IKSGGGGSEVQLVESGGGLVQPGGSLKLSCAASGFTFNKYAMNWVRQAPGKGLEWVARIRSK |
| | | | | YNNYATYYADSVKDRFTISRDDSKNTAYLQMNNLKTEDTAVYYCVRHGNFGNSYISYWAYWG |
| | | | | QGTLVTVSSGGGGSGGGGSGGGGSQTVVTQEPSLTVSPGGTVTLTCGSSTGAVTSGNYPNWV |
| | | | | QQKPGQAPRGLIGGTKFLAPGTPARFSGSLLGGKAALTLSGVQPEDEAEYYCVLWYSNRWVF |
| | | | | GGGTKLTVL |
| 495 | | DLL3-14- | bispecific | QVQLVQSGAEVKKPGASVKVSCKASGYTFTNYYMHWVRQAPGLGLEWMGIINPSDGSTSYAQ |
| | | 002 xI2C | molecule | KFQGRVTMTRDTSTNTVYMDLSSLRSEDTAVYYCARGGNSAFYSYYDMDVWGQGTTVTVSSG |
| | | | | GGGSGGGGSGGGGSDVVMTQTPLSLPVTLGQPASISCRSSQSLVYRDANTYLSWFQQRPGQS |
| | | | | PRRLIYKVSNWQSGVPDRFSGGGSGTDFTLKISRVEAEDVGVYYCMQGTHWPPTFGQGTKVE |
| | | | | IKSGGGGSEVQLVESGGGLVQPGGSLKLSCAASGFTFNKYAMNWVRQAPGKGLEWVARIRSK |
| | | | | YNNYATYYADSVKDRFTISRDDSKNTAYLQMNNLKTEDTAVYYCVRHGNFGNSYISYWAYWG |
| | | | | QGTLVTVSSGGGGSGGGGSGGGGSQTVVTQEPSLTVSPGGTVTLTCGSSTGAVTSGNYPNWV |
| | | | | QQKPGQAPRGLIGGTKFLAPGTPARFSGSLLGGKAALTLSGVQPEDEAEYYCVLWYSNRWVF |
| | | | | GGGTKLTVL |
| 496 | | DLL3-14- | bispecific | QVQLVQSGAEVKKPGASVKVSCKASGYTFTNYYMHWVRQAPGLGLEWMGIINPSDGSTSYAQ |
| | | 003 xI2C | molecule | KFQGRVTMTRDTSTNTVYMDLSSLRSEDTAVYYCARGGNSAFYSYYDMDVWGQGTTVTVSSG |
| | | | | GGGSGGGGSGGGGSDVVMTQTPLSLPVTLGQPASISCRSSQSLVYRDGQTYLSWFQQRPGQS |
| | | | | PRRLIYKVSNWQSGVPDRFSGGGSGTDFTLKISRVEAEDVGVYYCMQGTHWPPTFGQGTKVE |
| | | | | IKSGGGGSEVQLVESGGGLVQPGGSLKLSCAASGFTFNKYAMNWVRQAPGKGLEWVARIRSK |
| | | | | YNNYATYYADSVKDRFTISRDDSKNTAYLQMNNLKTEDTAVYYCVRHGNFGNSYISYWAYWG |
| | | | | QGTLVTVSSGGGGSGGGGSGGGGSQTVVTQEPSLTVSPGGTVTLTCGSSTGAVTSGNYPNWV |
| | | | | QQKPGQAPRGLIGGTKFLAPGTPARFSGSLLGGKAALTLSGVQPEDEAEYYCVLWYSNRWVF |
| | | | | GGGTKLTVL |
| 497 | | DLL3-14- | bispecific | QVQLVQSGAEVKKPGASVKVSCKASGYTFTNYYMHWVRQAPGLGLEWMGIINPSDGSTSYAQ |
| | | 004 xI2C | molecule | KFQGRVTMTRDTSTNTVYMDLSSLRSEDTAVYYCARGGNSAFYSYYDMDVWGQGTTVTVSSG |
| | | | | GGGSGGGGSGGGGSDVVMTQTPLSLPVTLGQPASISCRSSQSLVYRDGNAYLSWFQQRPGQS |
| | | | | PRRLIYKVSNWQSGVPDRFSGGGSGTDFTLKISRVEAEDVGVYYCMQGTHWPPTFGQGTKVE |
| | | | | IKSGGGGSEVQLVESGGGLVQPGGSLKLSCAASGFTFNKYAMNWVRQAPGKGLEWVARIRSK |
| | | | | YNNYATYYADSVKDRFTISRDDSKNTAYLQMNNLKTEDTAVYYCVRHGNFGNSYISYWAYWG |
| | | | | QGTLVTVSSGGGGSGGGGSGGGGSQTVVTQEPSLTVSPGGTVTLTCGSSTGAVTSGNYPNWV |
| | | | | QQKPGQAPRGLIGGTKFLAPGTPARFSGSLLGGKAALTLSGVQPEDEAEYYCVLWYSNRWVF |
| | | | | GGGTKLTVL |
| 498 | | DLL3-14- | bispecific | QVQLVQSGAEVKKPGASVKVSCKASGYTFTNYYMHWVRQAPGLGLEWMGIINPSDGSTSYAQ |
| | | 005 xI2C | molecule | KFQGRVTMTRDTSTNTVYMDLSSLRSEDTAVYYCARGGNSAFYSYYDMDVWGQGTTVTVSSG |
| | | | | GGGSGGGGSGGGGSDVVMTQTPLSLPVTLGQPASISCRSSQSLVYRDGNTYLSWFQQRPGQS |
| | | | | PRRLIYKVSNWQSGVPDRFSGSGSGTDFTLKISRVEAEDVGVYYCMQGTHWPPTFGQGTKVE |
| | | | | IKSGGGGSEVQLVESGGGLVQPGGSLKLSCAASGFTFNKYAMNWVRQAPGKGLEWVARIRSK |
| | | | | YNNYATYYADSVKDRFTISRDDSKNTAYLQMNNLKTEDTAVYYCVRHGNFGNSYISYWAYWG |
| | | | | QGTLVTVSSGGGGSGGGGSGGGGSQTVVTQEPSLTVSPGGTVTLTCGSSTGAVTSGNYPNWV |
| | | | | QQKPGQAPRGLIGGTKFLAPGTPARFSGSLLGGKAALTLSGVQPEDEAEYYCVLWYSNRWVF |
| | | | | GGGTKLTVL |
| 499 | | DLL3-14- | bispecific | QVQLVQSGAEVKKPGASVKVSCKASGYTFTNYYMHWVRQAPGQGLEWMGIINPSDGSTSYAQ |
| | | 006 x12C | molecule | KFQGRVTMTRDTSTNTVYMDLSSLRSEDTAVYYCARGGNSAFYSYYDMDVWGQGTTVTVSSG |
| | | | | GGGSGGGGSGGGGSDVVMTQTPLSLPVTLGQPASISCRSSQSLVYRDGNTYLSWFQQRPGQS |
| | | | | PRRLIYKVSNWQSGVPDRFSGGGSGTDFTLKISRVEAEDVGVYYCMQGTHWPPTFGQGTKVE |
| | | | | IKSGGGGSEVQLVESGGGLVQPGGSLKLSCAASGFTFNKYAMNWVRQAPGKGLEWVARIRSK |
| | | | | YNNYATYYADSVKDRFTISRDDSKNTAYLQMNNLKTEDTAVYYCVRHGNFGNSYISYWAYWG |
| | | | | QGTLVTVSSGGGGSGGGGSGGGGSQTVVTQEPSLTVSPGGTVTLTCGSSTGAVTSGNYPNWV |
| | | | | QQKPGQAPRGLIGGTKFLAPGTPARFSGSLLGGKAALTLSGVQPEDEAEYYCVLWYSNRWVF |
| | | | | GGGTKLTVL |
| 500 | | DLL3-14- | bispecific | QVQLVQSGAEVKKPGASVKVSCKASGYTFTNYYMHWVRQAPGLGLEWMGIINPSEGSTSYAQ |
| | | 007 xI2C | molecule | KFQGRVTMTRDTSTNTVYMDLSSLRSEDTAVYYCARGGNSAFYSYYDMDVWGQGTTVTVSSG |
| | | | | GGGSGGGGSGGGGSDVVMTQTPLSLPVTLGQPASISCRSSQSLVYRDGNTYLSWFQQRPGQS |
| | | | | PRRLIYKVSNWQSGVPDRFSGGGSGTDFTLKISRVEAEDVGVYYCMQGTHWPPTFGQGTKVE |
| | | | | IKSGGGGSEVQLVESGGGLVQPGGSLKLSCAASGFTFNKYAMNWVRQAPGKGLEWVARIRSK |
| | | | | YNNYATYYADSVKDRFTISRDDSKNTAYLQMNNLKTEDTAVYYCVRHGNFGNSYISYWAYWG |
| | | | | QGTLVTVSSGGGGSGGGGSGGGGSQTVVTQEPSLTVSPGGTVTLTCGSSTGAVTSGNYPNWV |
| | | | | QQKPGQAPRGLIGGTKFLAPGTPARFSGSLLGGKAALTLSGVQPEDEAEYYCVLWYSNRWVF |
| | | | | GGGTKLTVL |
| 501 | | DLL3-14- | bispecific | QVQLVQSGAEVKKPGASVKVSCKASGYTFTNYYMHWVRQAPGLGLEWMGIINPSDASTSYAQ |
| | | 008 xI2C | molecule | KFQGRVTMTRDTSTNTVYMDLSSLRSEDTAVYYCARGGNSAFYSYYDMDVWGQGTTVTVSSG |
| | | | | GGGSGGGGSGGGGSDVVMTQTPLSLPVTLGQPASISCRSSQSLVYRDGNTYLSWFQQRPGQS |
| | | | | PRRLIYKVSNWQSGVPDRFSGGGSGTDFTLKISRVEAEDVGVYYCMQGTHWPPTFGQGTKVE |
| | | | | IKSGGGGSEVQLVESGGGLVQPGGSLKLSCAASGFTFNKYAMNWVRQAPGKGLEWVARIRSK |
| | | | | YNNYATYYADSVKDRFTISRDDSKNTAYLQMNNLKTEDTAVYYCVRHGNFGNSYISYWAYWG |
| | | | | QGTLVTVSSGGGGSGGGGSGGGGSQTVVTQEPSLTVSPGGTVTLTCGSSTGAVTSGNYPNWV |
| | | | | QQKPGQAPRGLIGGTKFLAPGTPARFSGSLLGGKAALTLSGVQPEDEAEYYCVLWYSNRWVF |
| | | | | GGGTKLTVL |
| 502 | | DLL3-14- | bispecific | QVQLVQSGAEVKKPGASVKVSCKASGYTFTNYYMHWVRQAPGQGLEWMGIINPSDGSTSYAQ |
| | | 009 xI2C | molecule | KFQGRVTMTRDTSTNTVYMDLSSLRSEDTAVYYCARGGNSAFYSYYDMDVWGQGTTVTVSSG |
| | | | | GGGSGGGGSGGGGSDVVMTQTPLSLPVTLGQPASISCRSSQSLVYRDGNTYLSWFQQRPGQS |
| | | | | PRRLIYKVSNWQSGVPDRFSGSGSGTDFTLKISRVEAEDVGVYYCMQGTHWPPTFGQGTKVE |
| | | | | IKSGGGGSEVQLVESGGGLVQPGGSLKLSCAASGFTFNKYAMNWVRQAPGKGLEWVARIRSK |
| | | | | YNNYATYYADSVKDRFTISRDDSKNTAYLQMNNLKTEDTAVYYCVRHGNFGNSYISYWAYWG |
| | | | | QGTLVTVSSGGGGSGGGGSGGGGSQTVVTQEPSLTVSPGGTVTLTCGSSTGAVTSGNYPNWV |
| | | | | QQKPGQAPRGLIGGTKFLAPGTPARFSGSLLGGKAALTLSGVQPEDEAEYYCVLWYSNRWVF |
| | | | | GGGTKLTVL |
| 503 | | DLL3-14- | bispecific | QVQLVQSGAEVKKPGASVKVSCKASGYTFTNYYMHWVRQAPGQGLEWMGIINPSEGSTSYAQ |
| | | 010 xI2C | molecule | KFQGRVTMTRDTSTNTVYMDLSSLRSEDTAVYYCARGGNSAFYSYYDMDVWGQGTTVTVSSG |
| | | | | GGGSGGGGSGGGGSDVVMTQTPLSLPVTLGQPASISCRSSQSLVYREGNTYLSWFQQRPGQS |
| | | | | PRRLIYKVSNWQSGVPDRFSGSGSGTDFTLKISRVEAEDVGVYYCMQGTHWPPTFGQGTKVE |
| | | | | IKSGGGGSEVQLVESGGGLVQPGGSLKLSCAASGFTFNKYAMNWVRQAPGKGLEWVARIRSK |
| | | | | YNNYATYYADSVKDRFTISRDDSKNTAYLQMNNLKTEDTAVYYCVRHGNFGNSYISYWAYWG |
| | | | | QGTLVTVSSGGGGSGGGGSGGGGSQTVVTQEPSLTVSPGGTVTLTCGSSTGAVTSGNYPNWV |
| | | | | QQKPGQAPRGLIGGTKFLAPGTPARFSGSLLGGKAALTLSGVQPEDEAEYYCVLWYSNRWVF |
| | | | | GGGTKLTVL |
| 504 | | DLL3-14- | bispecific | QVQLVQSGAEVKKPGASVKVSCKASGYTFTNYYMHWVRQAPGQGLEWMGIINPSDASTSYAQ |
| | | 011 xI2C | molecule | KFQGRVTMTRDTSTNTVYMDLSSLRSEDTAVYYCARGGNSAFYSYYDMDVWGQGTTVTVSSG |
| | | | | GGGSGGGGSGGGGSDVVMTQTPLSLPVTLGQPASISCRSSQSLVYRDANTYLSWFQQRPGQS |
| | | | | PRRLIYKVSNWQSGVPDRFSGSGSGTDFTLKISRVEAEDVGVYYCMQGTHWPPTFGQGTKVE |
| | | | | IKSGGGGSEVQLVESGGGLVQPGGSLKLSCAASGFTFNKYAMNWVRQAPGKGLEWVARIRSK |
| | | | | YNNYATYYADSVKDRFTISRDDSKNTAYLQMNNLKTEDTAVYYCVRHGNFGNSYISYWAYWG |
| | | | | QGTLVTVSSGGGGSGGGGSGGGGSQTVVTQEPSLTVSPGGTVTLTCGSSTGAVTSGNYPNWV |
| | | | | QQKPGQAPRGLIGGTKFLAPGTPARFSGSLLGGKAALTLSGVQPEDEAEYYCVLWYSNRWVF |
| | | | | GGGTKLTVL |
| 505 | | DLL3-14- | bispecific | QVQLVQSGAEVKKPGASVKVSCKASGYTFTNYYMHWVRQAPGLCLEWMGIINPSDGSTSYAQ |
| | | 012 (CC) | molecule | KFQGRVTMTRDTSTNTVYMDLSSLRSEDTAVYYCARGGNSAFYSYYDMDVWGQGTTVTVSSG |
| | | xI2C | | GGGSGGGGSGGGGSDVVMTQTPLSLPVTLGQPASISCRSSQSLVYRDGNTYLSWFQQRPGQS |
| | | | | PRRLIYKVSNWQSGVPDRFSGGGSGTDFTLKISRVEAEDVGVYYCMQGTHWPPTFGCGTKVE |
| | | | | IKSGGGGSEVQLVESGGGLVQPGGSLKLSCAASGFTFNKYAMNWVRQAPGKGLEWVARIRSK |
| | | | | YNNYATYYADSVKDRFTISRDDSKNTAYLQMNNLKTEDTAVYYCVRHGNFGNSYISYWAYWG |
| | | | | QGTLVTVSSGGGGSGGGGSGGGGSQTVVTQEPSLTVSPGGTVTLTCGSSTGAVTSGNYPNWV |
| | | | | QQKPGQAPRGLIGGTKFLAPGTPARFSGSLLGGKAALTLSGVQPEDEAEYYCVLWYSNRWVF |
| | | | | GGGTKLTVL |
| 506 | | DLL3-14- | bispecific | QVQLVQSGAEVKKPGASVKVSCKASGYTFTNYYMHWVRQAPGLCLEWMGIINPSDGSTSYAQ |
| | | 013 xI2C | molecule | KFQGRVTMTRDTSTNTVYMDLSSLRSEDTAVYYCARGGNSAFYSYYDMDVWGQGTTVTVSSG |
| | | | | GGGSGGGGSGGGGSDVVMTQTPLSLPVTLGQPASISCRSSQSLVYREGNTYLSWFQQRPGQS |
| | | | | PRRLIYKVSNWQSGVPDRFSGGGSGTDFTLKISRVEAEDVGVYYCMQGTHWPPTFGCGTKVE |
| | | | | IKSGGGGSEVQLVESGGGLVQPGGSLKLSCAASGFTFNKYAMNWVRQAPGKGLEWVARIRSK |
| | | | | YNNYATYYADSVKDRFTISRDDSKNTAYLQMNNLKTEDTAVYYCVRHGNFGNSYISYWAYWG |
| | | | | QGTLVTVSSGGGGSGGGGSGGGGSQTVVTQEPSLTVSPGGTVTLTCGSSTGAVTSGNYPNWV |
| | | | | QQKPGQAPRGLIGGTKFLAPGTPARFSGSLLGGKAALTLSGVQPEDEAEYYCVLWYSNRWVF |
| | | | | GGGTKLTVL |
| 507 | | DLL3-14- | bispecific | QVQLVQSGAEVKKPGASVKVSCKASGYTFTNYYMHWVRQAPGLCLEWMGIINPSDGSTSYAQ |
| | | 014 xI2C | molecule | KFQGRVTMTRDTSTNTVYMDLSSLRSEDTAVYYCARGGNSAFYSYYDMDVWGQGTTVTVSSG |
| | | | | GGGSGGGGSGGGGSDVVMTQTPLSLPVTLGQPASISCRSSQSLVYRDANTYLSWFQQRPGQS |
| | | | | PRRLIYKVSNWQSGVPDRFSGGGSGTDFTLKISRVEAEDVGVYYCMQGTHWPPTFGCGTKVE |
| | | | | IKSGGGGSEVQLVESGGGLVQPGGSLKLSCAASGFTFNKYAMNWVRQAPGKGLEWVARIRSK |
| | | | | YNNYATYYADSVKDRFTISRDDSKNTAYLQMNNLKTEDTAVYYCVRHGNFGNSYISYWAYWG |
| | | | | QGTLVTVSSGGGGSGGGGSGGGGSQTVVTQEPSLTVSPGGTVTLTCGSSTGAVTSGNYPNWV |
| | | | | QQKPGQAPRGLIGGTKFLAPGTPARFSGSLLGGKAALTLSGVQPEDEAEYYCVLWYSNRWVF |
| | | | | GGGTKLTVL |
| 508 | | DLL3-14- | bispecific | QVQLVQSGAEVKKPGASVKVSCKASGYTFTNYYMHWVRQAPGLCLEWMGIINPSDGSTSYAQ |
| | | 015 xI2C | molecule | KFQGRVTMTRDTSTNTVYMDLSSLRSEDTAVYYCARGGNSAFYSYYDMDVWGQGTTVTVSSG |
| | | | | GGGSGGGGSGGGGSDVVMTQTPLSLPVTLGQPASISCRSSQSLVYRDGQTYLSWFQQRPGQS |
| | | | | PRRLIYKVSNWQSGVPDRFSGGGSGTDFTLKISRVEAEDVGVYYCMQGTHWPPTFGCGTKVE |
| | | | | IKSGGGGSEVQLVESGGGLVQPGGSLKLSCAASGFTFNKYAMNWVRQAPGKGLEWVARIRSK |
| | | | | YNNYATYYADSVKDRFTISRDDSKNTAYLQMNNLKTEDTAVYYCVRHGNFGNSYISYWAYWG |
| | | | | QGTLVTVSSGGGGSGGGGSGGGGSQTVVTQEPSLTVSPGGTVTLTCGSSTGAVTSGNYPNWV |
| | | | | QQKPGQAPRGLIGGTKFLAPGTPARFSGSLLGGKAALTLSGVQPEDEAEYYCVLWYSNRWVF |
| | | | | GGGTKLTVL |
| 509 | | DLL3-14- | bispecific | QVQLVQSGAEVKKPGASVKVSCKASGYTFTNYYMHWVRQAPGLCLEWMGIINPSDGSTSYAQ |
| | | 016 xI2C | molecule | KFQGRVTMTRDTSTNTVYMDLSSLRSEDTAVYYCARGGNSAFYSYYDMDVWGQGTTVTVSSG |
| | | | | GGGSGGGGSGGGGSDVVMTQTPLSLPVTLGQPASISCRSSQSLVYRDGNAYLSWFQQRPGQS |
| | | | | PRRLIYKVSNWQSGVPDRFSGGGSGTDFTLKISRVEAEDVGVYYCMQGTHWPPTFGCGTKVE |
| | | | | IKSGGGGSEVQLVESGGGLVQPGGSLKLSCAASGFTFNKYAMNWVRQAPGKGLEWVARIRSK |
| | | | | YNNYATYYADSVKDRFTISRDDSKNTAYLQMNNLKTEDTAVYYCVRHGNFGNSYISYWAYWG |
| | | | | QGTLVTVSSGGGGSGGGGSGGGGSQTVVTQEPSLTVSPGGTVTLTCGSSTGAVTSGNYPNWV |
| | | | | QQKPGQAPRGLIGGTKFLAPGTPARFSGSLLGGKAALTLSGVQPEDEAEYYCVLWYSNRWVF |
| | | | | GGGTKLTVL |
| 510 | | DLL3-14- | bispecific | QVQLVQSGAEVKKPGASVKVSCKASGYTFTNYYMHWVRQAPGLCLEWMGIINPSDGSTSYAQ |
| | | 017 xI2C | molecule | KFQGRVTMTRDTSTNTVYMDLSSLRSEDTAVYYCARGGNSAFYSYYDMDVWGQGTTVTVSSG |
| | | | | GGGSGGGGSGGGGSDVVMTQTPLSLPVTLGQPASISCRSSQSLVYRDGNTYLSWFQQRPGQS |
| | | | | PRRLIYKVSNWQSGVPDRFSGSGSGTDFTLKISRVEAEDVGVYYCMQGTHWPPTFGCGTKVE |
| | | | | IKSGGGGSEVQLVESGGGLVQPGGSLKLSCAASGFTFNKYAMNWVRQAPGKGLEWVARIRSK |
| | | | | YNNYATYYADSVKDRFTISRDDSKNTAYLQMNNLKTEDTAVYYCVRHGNFGNSYISYWAYWG |
| | | | | QGTLVTVSSGGGGSGGGGSGGGGSQTVVTQEPSLTVSPGGTVTLTCGSSTGAVTSGNYPNWV |
| | | | | QQKPGQAPRGLIGGTKFLAPGTPARFSGSLLGGKAALTLSGVQPEDEAEYYCVLWYSNRWVF |
| | | | | GGGTKLTVL |
| 511 | | DLL3-14- | bispecific | QVQLVQSGAEVKKPGASVKVSCKASGYTFTNYYMHWVRQAPGQCLEWMGIINPSDGSTSYAQ |
| | | 018 xI2C | molecule | KFQGRVTMTRDTSTNTVYMDLSSLRSEDTAVYYCARGGNSAFYSYYDMDVWGQGTTVTVSSG |
| | | | | GGGSGGGGSGGGGSDVVMTQTPLSLPVTLGQPASISCRSSQSLVYRDGNTYLSWFQQRPGQS |
| | | | | PRRLIYKVSNWQSGVPDRFSGGGSGTDFTLKISRVEAEDVGVYYCMQGTHWPPTFGCGTKVE |
| | | | | IKSGGGGSEVQLVESGGGLVQPGGSLKLSCAASGFTFNKYAMNWVRQAPGKGLEWVARIRSK |
| | | | | YNNYATYYADSVKDRFTISRDDSKNTAYLQMNNLKTEDTAVYYCVRHGNFGNSYISYWAYWG |
| | | | | QGTLVTVSSGGGGSGGGGSGGGGSQTVVTQEPSLTVSPGGTVTLTCGSSTGAVTSGNYPNWV |
| | | | | QQKPGQAPRGLIGGTKFLAPGTPARFSGSLLGGKAALTLSGVQPEDEAEYYCVLWYSNRWVF |
| | | | | GGGTKLTVL |
| 512 | | DLL3-14- | bispecific | QVQLVQSGAEVKKPGASVKVSCKASGYTFTNYYMHWVRQAPGLCLEWMGIINPSEGSTSYAQ |
| | | 019 xI2C | molecule | KFQGRVTMTRDTSTNTVYMDLSSLRSEDTAVYYCARGGNSAFYSYYDMDVWGQGTTVTVSSG |
| | | | | GGGSGGGGSGGGGSDVVMTQTPLSLPVTLGQPASISCRSSQSLVYRDGNTYLSWFQQRPGQS |
| | | | | PRRLIYKVSNWQSGVPDRFSGGGSGTDFTLKISRVEAEDVGVYYCMQGTHWPPTFGCGTKVE |
| | | | | IKSGGGGSEVQLVESGGGLVQPGGSLKLSCAASGFTFNKYAMNWVRQAPGKGLEWVARIRSK |
| | | | | YNNYATYYADSVKDRFTISRDDSKNTAYLQMNNLKTEDTAVYYCVRHGNFGNSYISYWAYWG |
| | | | | QGTLVTVSSGGGGSGGGGSGGGGSQTVVTQEPSLTVSPGGTVTLTCGSSTGAVTSGNYPNWV |
| | | | | QQKPGQAPRGLIGGTKFLAPGTPARFSGSLLGGKAALTLSGVQPEDEAEYYCVLWYSNRWVF |
| | | | | GGGTKLTVL |
| 513 | | DLL3-14- | bispecific | QVQLVQSGAEVKKPGASVKVSCKASGYTFTNYYMHWVRQAPGLCLEWMGIINPSDASTSYAQ |
| | | 020 xI2C | molecule | KFQGRVTMTRDTSTNTVYMDLSSLRSEDTAVYYCARGGNSAFYSYYDMDVWGQGTTVTVSSG |
| | | | | GGGSGGGGSGGGGSDVVMTQTPLSLPVTLGQPASISCRSSQSLVYRDGNTYLSWFQQRPGQS |
| | | | | PRRLIYKVSNWQSGVPDRFSGGGSGTDFTLKISRVEAEDVGVYYCMQGTHWPPTFGCGTKVE |
| | | | | IKSGGGGSEVQLVESGGGLVQPGGSLKLSCAASGFTFNKYAMNWVRQAPGKGLEWVARIRSK |
| | | | | YNNYATYYADSVKDRFTISRDDSKNTAYLQMNNLKTEDTAVYYCVRHGNFGNSYISYWAYWG |
| | | | | QGTLVTVSSGGGGSGGGGSGGGGSQTVVTQEPSLTVSPGGTVTLTCGSSTGAVTSGNYPNWV |
| | | | | QQKPGQAPRGLIGGTKFLAPGTPARFSGSLLGGKAALTLSGVQPEDEAEYYCVLWYSNRWVF |
| | | | | GGGTKLTVL |
| 514 | | DLL3-14- | bispecific | QVQLVQSGAEVKKPGASVKVSCKASGYTFTNYYMHWVRQAPGQCLEWMGIINPSDGSTSYAQ |
| | | 021 xI2C | molecule | KFQGRVTMTRDTSTNTVYMDLSSLRSEDTAVYYCARGGNSAFYSYYDMDVWGQGTTVTVSSG |
| | | | | GGGSGGGGSGGGGSDVVMTQTPLSLPVTLGQPASISCRSSQSLVYRDGNTYLSWFQQRPGQS |
| | | | | PRRLIYKVSNWQSGVPDRFSGSGSGTDFTLKISRVEAEDVGVYYCMQGTHWPPTFGCGTKVE |
| | | | | IKSGGGGSEVQLVESGGGLVQPGGSLKLSCAASGFTFNKYAMNWVRQAPGKGLEWVARIRSK |
| | | | | YNNYATYYADSVKDRFTISRDDSKNTAYLQMNNLKTEDTAVYYCVRHGNFGNSYISYWAYWG |
| | | | | QGTLVTVSSGGGGSGGGGSGGGGSQTVVTQEPSLTVSPGGTVTLTCGSSTGAVTSGNYPNWV |
| | | | | QQKPGQAPRGLIGGTKFLAPGTPARFSGSLLGGKAALTLSGVQPEDEAEYYCVLWYSNRWVF |
| | | | | GGGTKLTVL |
| 515 | | DLL3-14- | bispecific | QVQLVQSGAEVKKPGASVKVSCKASGYTFTNYYMHWVRQAPGQCLEWMGIINPSEGSTSYAQ |
| | | 022 xI2C | molecule | KFQGRVTMTRDTSTNTVYMDLSSLRSEDTAVYYCARGGNSAFYSYYDMDVWGQGTTVTVSSG |
| | | | | GGGSGGGGSGGGGSDVVMTQTPLSLPVTLGQPASISCRSSQSLVYREGNTYLSWFQQRPGQS |
| | | | | PRRLIYKVSNWQSGVPDRFSGSGSGTDFTLKISRVEAEDVGVYYCMQGTHWPPTFGCGTKVE |
| | | | | IKSGGGGSEVQLVESGGGLVQPGGSLKLSCAASGFTFNKYAMNWVRQAPGKGLEWVARIRSK |
| | | | | YNNYATYYADSVKDRFTISRDDSKNTAYLQMNNLKTEDTAVYYCVRHGNFGNSYISYWAYWG |
| | | | | QGTLVTVSSGGGGSGGGGSGGGGSQTVVTQEPSLTVSPGGTVTLTCGSSTGAVTSGNYPNWV |
| | | | | QQKPGQAPRGLIGGTKFLAPGTPARFSGSLLGGKAALTLSGVQPEDEAEYYCVLWYSNRWVF |
| | | | | GGGTKLTVL |
| 516 | | DLL3-14- | bispecific | QVQLVQSGAEVKKPGASVKVSCKASGYTFTNYYMHWVRQAPGQCLEWMGIINPSDASTSYAQ |
| | | 023 xI2C | molecule | KFQGRVTMTRDTSTNTVYMDLSSLRSEDTAVYYCARGGNSAFYSYYDMDVWGQGTTVTVSSG |
| | | | | GGGSGGGGSGGGGSDVVMTQTPLSLPVTLGQPASISCRSSQSLVYRDANTYLSWFQQRPGQS |
| | | | | PRRLIYKVSNWQSGVPDRFSGSGSGTDFTLKISRVEAEDVGVYYCMQGTHWPPTFGCGTKVE |
| | | | | IKSGGGGSEVQLVESGGGLVQPGGSLKLSCAASGFTFNKYAMNWVRQAPGKGLEWVARIRSK |
| | | | | YNNYATYYADSVKDRFTISRDDSKNTAYLQMNNLKTEDTAVYYCVRHGNFGNSYISYWAYWG |
| | | | | QGTLVTVSSGGGGSGGGGSGGGGSQTVVTQEPSLTVSPGGTVTLTCGSSTGAVTSGNYPNWV |
| | | | | QQKPGQAPRGLIGGTKFLAPGTPARFSGSLLGGKAALTLSGVQPEDEAEYYCVLWYSNRWVF |
| | | | | GGGTKLTVL |
| 517 | | DLL3-4 | bispecific | QVQLQESGPGLVKPSETLSLTCTVSGGSISSYYWSWIRQPPGKGLEWIGYVYYSGTTNYNPS |
| | | xI2C- | HLE | LKSRVTISVDTSKNQFSLKLSSVTAADTAVYYCASIAVTGFYFDYWGQGTLVTVSSGGGGSG |
| | | scFc | molecule | GGGSGGGGSEIVLTQSPGTLSLSPGERVTLSCRASQRVNNNYLAWYQQRPGQAPRLLIYGAS |
| | | | | SRATGIPDRFSGSGSGTDFTLTISRLEPEDFAVYYCQQYDRSPLTFGGGTKLEIKSGGGGSE |
| | | | | VQLVESGGGLVQPGGSLKLSCAASGFTFNKYAMNWVRQAPGKGLEWVARIRSKYNNYATYYA |
| | | | | DSVKDRFTISRDDSKNTAYLQMNNLKTEDTAVYYCVRHGNFGNSYISYWAYWGQGTLVTVSS |
| | | | | GGGGSGGGGSGGGGSQTVVTQEPSLTVSPGGTVTLTCGSSTGAVTSGNYPNWVQQKPGQAPR |
| | | | | GLIGGTKFLAPGTPARFSGSLLGGKAALTLSGVQPEDEAEYYCVLWYSNRWVFGGGTKLTVL |
| | | | | GGGGDKTHTCPPCPAPELLGGPSVFLFPPKPKDTLMISRTPEVTCVVVDVSHEDPEVKFNWY |
| | | | | VDGVEVHNAKTKPCEEQYGSTYRCVSVLTVLHQDWLNGKEYKCKVSNKALPAPIEKTISKAK |
| | | | | GQPREPQVYTLPPSREEMTKNQVSLTCLVKGFYPSDIAVEWESNGQPENNYKTTPPVLDSDG |
| | | | | SFFLYSKLTVDKSRWQQGNVFSCSVMHEALHNHYTQKSLSLSPGKGGGGSGGGGSGGGGSGG |
| | | | | GGSGGGGSGGGGSDKTHTCPPCPAPELLGGPSVFLFPPKPKDTLMISRTPEVTCVVVDVSHE |
| | | | | DPEVKFNWYVDGVEVHNAKTKPCEEQYGSTYRCVSVLTVLHQDWLNGKEYKCKVSNKALPAP |
| | | | | IEKTISKAKGQPREPQVYTLPPSREEMTKNQVSLTCLVKGFYPSDIAVEWESNGQPENNYKT |
| | | | | TPPVLDSDGSFFLYSKLTVDKSRWQQGNVFSCSVMHEALHNHYTQKSLSLSPGK |
| 518 | | DLL3-4 | bispecific | QVQLQESGPGLVKPSETLSLTCTVSGGSISSYYWSWIRQPPGKGLEWIGYVYYSGTTNYNPS |
| | | xI2C- | HLE | LKSRVTISVDTSKNQFSLKLSSVTAADTAVYYCASIAVTGFYFDYWGQGTLVTVSSGGGGSG |
| | | scFc_del | molecule | GGGSGGGGSEIVLTQSPGTLSLSPGERVTLSCRASQRVNNNYLAWYQQRPGQAPRLLIYGAS |
| | | GK | | SRATGIPDRFSGSGSGTDFTLTISRLEPEDFAVYYCQQYDRSPLTFGGGTKLEIKSGGGGSE |
| | | | | VQLVESGGGLVQPGGSLKLSCAASGFTFNKYAMNWVRQAPGKGLEWVARIRSKYNNYATYYA |
| | | | | DSVKDRFTISRDDSKNTAYLQMNNLKTEDTAVYYCVRHGNFGNSYISYWAYWGQGTLVTVSS |
| | | | | GGGGSGGGGSGGGGSQTVVTQEPSLTVSPGGTVTLTCGSSTGAVTSGNYPNWVQQKPGQAPR |
| | | | | GLIGGTKFLAPGTPARFSGSLLGGKAALTLSGVQPEDEAEYYCVLWYSNRWVFGGGTKLTVL |
| | | | | GGGGDKTHTCPPCPAPELLGGPSVFLFPPKPKDTLMISRTPEVTCVVVDVSHEDPEVKFNWY |
| | | | | VDGVEVHNAKTKPCEEQYGSTYRCVSVLTVLHQDWLNGKEYKCKVSNKALPAPIEKTISKAK |
| | | | | GQPREPQVYTLPPSREEMTKNQVSLTCLVKGFYPSDIAVEWESNGQPENNYKTTPPVLDSDG |
| | | | | SFFLYSKLTVDKSRWQQGNVFSCSVMHEALHNHYTQKSLSLSPGGGGSGGGGSGGGGSGGGG |
| | | | | SGGGGSGGGGSDKTHTCPPCPAPELLGGPSVFLFPPKPKDTLMISRTPEVTCVVVDVSHEDP |
| | | | | EVKFNWYVDGVEVHNAKTKPCEEQYGSTYRCVSVLTVLHQDWLNGKEYKCKVSNKALPAPIE |
| | | | | KTISKAKGQPREPQVYTLPPSREEMTKNQVSLTCLVKGFYPSDIAVEWESNGQPENNYKTTP |
| | | | | PVLDSDGSFFLYSKLTVDKSRWQQGNVFSCSVMHEALHNHYTQKSLSLSPGK |
| 519 | | DLL3-4- | bispecific | QVQLQESGPGLVKPSETLSLTCTVSGGSISSYYWSWIRQPPGKCLEWIGYVYYSGTTNYNPS |
| | | 001 (CC) | HLE | LKSRVTISVDTSKNQFSLKLSSVTAADTAVYYCASIAVTGFYFDYWGQGTLVTVSSGGGGSG |
| | | xI2C - | molecule | GGGSGGGGSEIVLTQSPGTLSLSPGERVTLSCRASQRVNNNYLAWYQQRPGQAPRLLIYGAS |
| | | scFc | | SRATGIPDRFSGSGSGTDFTLTISRLEPEDFAVYYCQQYDRSPLTFGCGTKLEIKSGGGGSE |
| | | | | VQLVESGGGLVQPGGSLKLSCAASGFTFNKYAMNWVRQAPGKGLEWVARIRSKYNNYATYYA |
| | | | | DSVKDRFTISRDDSKNTAYLQMNNLKTEDTAVYYCVRHGNFGNSYISYWAYWGQGTLVTVSS |
| | | | | GGGGSGGGGSGGGGSQTVVTQEPSLTVSPGGTVTLTCGSSTGAVTSGNYPNWVQQKPGQAPR |
| | | | | GLIGGTKFLAPGTPARFSGSLLGGKAALTLSGVQPEDEAEYYCVLWYSNRWVFGGGTKLTVL |
| | | | | GGGGDKTHTCPPCPAPELLGGPSVFLFPPKPKDTLMISRTPEVTCVVVDVSHEDPEVKFNWY |
| | | | | VDGVEVHNAKTKPCEEQYGSTYRCVSVLTVLHQDWLNGKEYKCKVSNKALPAPIEKTISKAK |
| | | | | GQPREPQVYTLPPSREEMTKNQVSLTCLVKGFYPSDIAVEWESNGQPENNYKTTPPVLDSDG |
| | | | | SFFLYSKLTVDKSRWQQGNVFSCSVMHEALHNHYTQKSLSLSPGKGGGGSGGGGSGGGGSGG |
| | | | | GGSGGGGSGGGGSDKTHTCPPCPAPELLGGPSVFLFPPKPKDTLMISRTPEVTCVVVDVSHE |
| | | | | DPEVKFNWYVDGVEVHNAKTKPCEEQYGSTYRCVSVLTVLHQDWLNGKEYKCKVSNKALPAP |
| | | | | IEKTISKAKGQPREPQVYTLPPSREEMTKNQVSLTCLVKGFYPSDIAVEWESNGQPENNYKT |
| | | | | TPPVLDSDGSFFLYSKLTVDKSRWQQGNVFSCSVMHEALHNHYTQKSLSLSPGK |
| 520 | | DLL3-4- | bispecific | QVQLQESGPGLVKPSETLSLTCTVSGGSISSYYWSWIRQPPGKCLEWIGYVYYSGTTNYNPS |
| | | 001 (CC) | HLE | LKSRVTISVDTSKNQFSLKLSSVTAADTAVYYCASIAVTGFYFDYWGQGTLVTVSSGGGGSG |
| | | xI2C - | molecule | GGGSGGGGSEIVLTQSPGTLSLSPGERVTLSCRASQRVNNNYLAWYQQRPGQAPRLLIYGAS |
| | | scFc_ | | SRATGIPDRFSGSGSGTDFTLTISRLEPEDFAVYYCQQYDRSPLTFGCGTKLEIKSGGGGSE |
| | | delGK | | VQLVESGGGLVQPGGSLKLSCAASGFTFNKYAMNWVRQAPGKGLEWVARIRSKYNNYATYYA |
| | | | | DSVKDRFTISRDDSKNTAYLQMNNLKTEDTAVYYCVRHGNFGNSYISYWAYWGQGTLVTVSS |
| | | | | GGGGSGGGGSGGGGSQTVVTQEPSLTVSPGGTVTLTCGSSTGAVTSGNYPNWVQQKPGQAPR |
| | | | | GLIGGTKFLAPGTPARFSGSLLGGKAALTLSGVQPEDEAEYYCVLWYSNRWVFGGGTKLTVL |
| | | | | GGGGDKTHTCPPCPAPELLGGPSVFLFPPKPKDTLMISRTPEVTCVVVDVSHEDPEVKFNWY |
| | | | | VDGVEVHNAKTKPCEEQYGSTYRCVSVLTVLHQDWLNGKEYKCKVSNKALPAPIEKTISKAK |
| | | | | GQPREPQVYTLPPSREEMTKNQVSLTCLVKGFYPSDIAVEWESNGQPENNYKTTPPVLDSDG |
| | | | | SFFLYSKLTVDKSRWQQGNVFSCSVMHEALHNHYTQKSLSLSPGGGGSGGGGSGGGGSGGGG |
| | | | | SGGGGSGGGGSDKTHTCPPCPAPELLGGPSVFLFPPKPKDTLMISRTPEVTCVVVDVSHEDP |
| | | | | EVKFNWYVDGVEVHNAKTKPCEEQYGSTYRCVSVLTVLHQDWLNGKEYKCKVSNKALPAPIE |
| | | | | KTISKAKGQPREPQVYTLPPSREEMTKNQVSLTCLVKGFYPSDIAVEWESNGQPENNYKTTP |
| | | | | PVLDSDGSFFLYSKLTVDKSRWQQGNVFSCSVMHEALHNHYTQKSLSLSPGK |
| 521 | | DLL3-6 | bispecific | QVQLQESGPGLVKPSETLSLTCTVSGASISSFYWSWIRQPPGKGLEWIGYIYYSGTTNYNPS |
| | | xI2C - | HLE | LKSRVTISVDTSKNQFSLKLSSVTAADTAVYYCARIAVAGFFFDYWGQGTLVTVSSGGGGSG |
| | | scFc | molecule | GGGSGGGGSEIVLTQSPGTLSLSPGERATLSCRASQSVNKNYLAWYQQKPGQAPRLLIYGAS |
| | | | | SRATGIPDRFSGSGSGTDFTLTISRLEPEDFAVYYCQQYDRSPLTFGGGTKVEIKSGGGGSE |
| | | | | VQLVESGGGLVQPGGSLKLSCAASGFTFNKYAMNWVRQAPGKGLEWVARIRSKYNNYATYYA |
| | | | | DSVKDRFTISRDDSKNTAYLQMNNLKTEDTAVYYCVRHGNFGNSYISYWAYWGQGTLVTVSS |
| | | | | GGGGSGGGGSGGGGSQTVVTQEPSLTVSPGGTVTLTCGSSTGAVTSGNYPNWVQQKPGQAPR |
| | | | | GLIGGTKFLAPGTPARFSGSLLGGKAALTLSGVQPEDEAEYYCVLWYSNRWVFGGGTKLTVL |
| | | | | GGGGDKTHTCPPCPAPELLGGPSVFLFPPKPKDTLMISRTPEVTCVVVDVSHEDPEVKFNWY |
| | | | | VDGVEVHNAKTKPCEEQYGSTYRCVSVLTVLHQDWLNGKEYKCKVSNKALPAPIEKTISKAK |
| | | | | GQPREPQVYTLPPSREEMTKNQVSLTCLVKGFYPSDIAVEWESNGQPENNYKTTPPVLDSDG |
| | | | | SFFLYSKLTVDKSRWQQGNVFSCSVMHEALHNHYTQKSLSLSPGKGGGGSGGGGSGGGGSGG |
| | | | | GGSGGGGSGGGGSDKTHTCPPCPAPELLGGPSVFLFPPKPKDTLMISRTPEVTCVVVDVSHE |
| | | | | DPEVKFNWYVDGVEVHNAKTKPCEEQYGSTYRCVSVLTVLHQDWLNGKEYKCKVSNKALPAP |
| | | | | IEKTISKAKGQPREPQVYTLPPSREEMTKNQVSLTCLVKGFYPSDIAVEWESNGQPENNYKT |
| | | | | TPPVLDSDGSFFLYSKLTVDKSRWQQGNVFSCSVMHEALHNHYTQKSLSLSPGK |
| 522 | | DLL3-6 | bispecific | QVQLQESGPGLVKPSETLSLTCTVSGASISSFYWSWIRQPPGKGLEWIGYIYYSGTTNYNPS |
| | | xI2C - | HLE | LKSRVTISVDTSKNQFSLKLSSVTAADTAVYYCARIAVAGFFFDYWGQGTLVTVSSGGGGSG |
| | | scFc_del | molecule | GGGSGGGGSEIVLTQSPGTLSLSPGERATLSCRASQSVNKNYLAWYQQKPGQAPRLLIYGAS |
| | | GK | | SRATGIPDRFSGSGSGTDFTLTISRLEPEDFAVYYCQQYDRSPLTFGGGTKVEIKSGGGGSE |
| | | | | VQLVESGGGLVQPGGSLKLSCAASGFTFNKYAMNWVRQAPGKGLEWVARIRSKYNNYATYYA |
| | | | | DSVKDRFTISRDDSKNTAYLQMNNLKTEDTAVYYCVRHGNFGNSYISYWAYWGQGTLVTVSS |
| | | | | GGGGSGGGGSGGGGSQTVVTQEPSLTVSPGGTVTLTCGSSTGAVTSGNYPNWVQQKPGQAPR |
| | | | | GLIGGTKFLAPGTPARFSGSLLGGKAALTLSGVQPEDEAEYYCVLWYSNRWVFGGGTKLTVL |
| | | | | GGGGDKTHTCPPCPAPELLGGPSVFLFPPKPKDTLMISRTPEVTCVVVDVSHEDPEVKFNWY |
| | | | | VDGVEVHNAKTKPCEEQYGSTYRCVSVLTVLHQDWLNGKEYKCKVSNKALPAPIEKTISKAK |
| | | | | GQPREPQVYTLPPSREEMTKNQVSLTCLVKGFYPSDIAVEWESNGQPENNYKTTPPVLDSDG |
| | | | | SFFLYSKLTVDKSRWQQGNVFSCSVMHEALHNHYTQKSLSLSPGGGGSGGGGSGGGGSGGGG |
| | | | | SGGGGSGGGGSDKTHTCPPCPAPELLGGPSVFLFPPKPKDTLMISRTPEVTCVVVDVSHEDP |
| | | | | EVKFNWYVDGVEVHNAKTKPCEEQYGSTYRCVSVLTVLHQDWLNGKEYKCKVSNKALPAPIE |
| | | | | KTISKAKGQPREPQVYTLPPSREEMTKNQVSLTCLVKGFYPSDIAVEWESNGQPENNYKTTP |
| | | | | PVLDSDGSFFLYSKLTVDKSRWQQGNVFSCSVMHEALHNHYTQKSLSLSPGK |
| 523 | | DLL3-6- | bispecific | QVQLQESGPGLVKPSETLSLTCTVSGASISSFYWSWIRQPPGKCLEWIGYIYYSGTTNYNPS |
| | | 001 (CC) | HLE | LKSRVTISVDTSKNQFSLKLSSVTAADTAVYYCARIAVAGFFFDYWGQGTLVTVSSGGGGSG |
| | | xI2C - | molecule | GGGSGGGGSEIVLTQSPGTLSLSPGERATLSCRASQSVNKNYLAWYQQKPGQAPRLLIYGAS |
| | | scFc | | SRATGIPDRFSGSGSGTDFTLTISRLEPEDFAVYYCQQYDRSPLTFGCGTKVEIKSGGGGSE |
| | | | | VQLVESGGGLVQPGGSLKLSCAASGFTFNKYAMNWVRQAPGKGLEWVARIRSKYNNYATYYA |
| | | | | DSVKDRFTISRDDSKNTAYLQMNNLKTEDTAVYYCVRHGNFGNSYISYWAYWGQGTLVTVSS |
| | | | | GGGGSGGGGSGGGGSQTVVTQEPSLTVSPGGTVTLTCGSSTGAVTSGNYPNWVQQKPGQAPR |
| | | | | GLIGGTKFLAPGTPARFSGSLLGGKAALTLSGVQPEDEAEYYCVLWYSNRWVFGGGTKLTVL |
| | | | | GGGGDKTHTCPPCPAPELLGGPSVFLFPPKPKDTLMISRTPEVTCVVVDVSHEDPEVKFNWY |
| | | | | VDGVEVHNAKTKPCEEQYGSTYRCVSVLTVLHQDWLNGKEYKCKVSNKALPAPIEKTISKAK |
| | | | | GQPREPQVYTLPPSREEMTKNQVSLTCLVKGFYPSDIAVEWESNGQPENNYKTTPPVLDSDG |
| | | | | SFFLYSKLTVDKSRWQQGNVFSCSVMHEALHNHYTQKSLSLSPGKGGGGSGGGGSGGGGSGG |
| | | | | GGSGGGGSGGGGSDKTHTCPPCPAPELLGGPSVFLFPPKPKDTLMISRTPEVTCVVVDVSHE |
| | | | | DPEVKFNWYVDGVEVHNAKTKPCEEQYGSTYRCVSVLTVLHQDWLNGKEYKCKVSNKALPAP |
| | | | | IEKTISKAKGQPREPQVYTLPPSREEMTKNQVSLTCLVKGFYPSDIAVEWESNGQPENNYKT |
| | | | | TPPVLDSDGSFFLYSKLTVDKSRWQQGNVFSCSVMHEALHNHYTQKSLSLSPGK |
| 524 | | DLL3-6- | bispecific | QVQLQESGPGLVKPSETLSLTCTVSGASISSFYWSWIRQPPGKCLEWIGYIYYSGTTNYNPS |
| | | 001 (CC) | HLE | LKSRVTISVDTSKNQFSLKLSSVTAADTAVYYCARIAVAGFFFDYWGQGTLVTVSSGGGGSG |
| | | xI2C - | molecule | GGGSGGGGSEIVLTQSPGTLSLSPGERATLSCRASQSVNKNYLAWYQQKPGQAPRLLIYGAS |
| | | scFc_del | | SRATGIPDRFSGSGSGTDFTLTISRLEPEDFAVYYCQQYDRSPLTFGCGTKVEIKSGGGGSE |
| | | GK | | VQLVESGGGLVQPGGSLKLSCAASGFTFNKYAMNWVRQAPGKGLEWVARIRSKYNNYATYYA |
| | | | | DSVKDRFTISRDDSKNTAYLQMNNLKTEDTAVYYCVRHGNFGNSYISYWAYWGQGTLVTVSS |
| | | | | GGGGSGGGGSGGGGSQTVVTQEPSLTVSPGGTVTLTCGSSTGAVTSGNYPNWVQQKPGQAPR |
| | | | | GLIGGTKFLAPGTPARFSGSLLGGKAALTLSGVQPEDEAEYYCVLWYSNRWVFGGGTKLTVL |
| | | | | GGGGDKTHTCPPCPAPELLGGPSVFLFPPKPKDTLMISRTPEVTCVVVDVSHEDPEVKFNWY |
| | | | | VDGVEVHNAKTKPCEEQYGSTYRCVSVLTVLHQDWLNGKEYKCKVSNKALPAPIEKTISKAK |
| | | | | GQPREPQVYTLPPSREEMTKNQVSLTCLVKGFYPSDIAVEWESNGQPENNYKTTPPVLDSDG |
| | | | | SFFLYSKLTVDKSRWQQGNVFSCSVMHEALHNHYTQKSLSLSPGGGGSGGGGSGGGGSGGGG |
| | | | | SGGGGSGGGGSDKTHTCPPCPAPELLGGPSVFLFPPKPKDTLMISRTPEVTCVVVDVSHEDP |
| | | | | EVKFNWYVDGVEVHNAKTKPCEEQYGSTYRCVSVLTVLHQDWLNGKEYKCKVSNKALPAPIE |
| | | | | KTISKAKGQPREPQVYTLPPSREEMTKNQVSLTCLVKGFYPSDIAVEWESNGQPENNYKTTP |
| | | | | PVLDSDGSFFLYSKLTVDKSRWQQGNVFSCSVMHEALHNHYTQKSLSLSPGK |
| 525 | | DLL3-14 | bispecific | QVQLVQSGAEVKKPGASVKVSCKASGYTFTNYYMHWVRQAPGLGLEWMGIINPSDGSTSYAQ |
| | | xI2C - | HLE | KFQGRVTMTRDTSTNTVYMDLSSLRSEDTAVYYCARGGNSAFYSYYDMDVWGQGTTVTVSSG |
| | | scFc | molecule | GGGSGGGGSGGGGSDVVMTQTPLSLPVTLGQPASISCRSSQSLVYRDGNTYLSWFQQRPGQS |
| | | | | PRRLIYKVSNWQSGVPDRFSGGGSGTDFTLKISRVEAEDVGVYYCMQGTHWPPTFGQGTKVE |
| | | | | IKSGGGGSEVQLVESGGGLVQPGGSLKLSCAASGFTFNKYAMNWVRQAPGKGLEWVARIRSK |
| | | | | YNNYATYYADSVKDRFTISRDDSKNTAYLQMNNLKTEDTAVYYCVRHGNFGNSYISYWAYWG |
| | | | | QGTLVTVSSGGGGSGGGGSGGGGSQTVVTQEPSLTVSPGGTVTLTCGSSTGAVTSGNYPNWV |
| | | | | QQKPGQAPRGLIGGTKFLAPGTPARFSGSLLGGKAALTLSGVQPEDEAEYYCVLWYSNRWVF |
| | | | | GGGTKLTVLGGGGDKTHTCPPCPAPELLGGPSVFLFPPKPKDTLMISRTPEVTCVVVDVSHE |
| | | | | DPEVKFNWYVDGVEVHNAKTKPCEEQYGSTYRCVSVLTVLHQDWLNGKEYKCKVSNKALPAP |
| | | | | IEKTISKAKGQPREPQVYTLPPSREEMTKNQVSLTCLVKGFYPSDIAVEWESNGQPENNYKT |
| | | | | TPPVLDSDGSFFLYSKLTVDKSRWQQGNVFSCSVMHEALHNHYTQKSLSLSPGKGGGGSGGG |
| | | | | GSGGGGSGGGGSGGGGSGGGGSDKTHTCPPCPAPELLGGPSVFLFPPKPKDTLMISRTPEVT |
| | | | | CVVVDVSHEDPEVKFNWYVDGVEVHNAKTKPCEEQYGSTYRCVSVLTVLHQDWLNGKEYKCK |
| | | | | VSNKALPAPIEKTISKAKGQPREPQVYTLPPSREEMTKNQVSLTCLVKGFYPSDIAVEWESN |
| | | | | GQPENNYKTTPPVLDSDGSFFLYSKLTVDKSRWQQGNVFSCSVMHEALHNHYTQKSLSLSPG |
| | | | | K |
| 526 | | DLL3-14 | bispecific | QVQLVQSGAEVKKPGASVKVSCKASGYTFTNYYMHWVRQAPGLGLEWMGIINPSDGSTSYAQ |
| | | xI2C - | HLE | KFQGRVTMTRDTSTNTVYMDLSSLRSEDTAVYYCARGGNSAFYSYYDMDVWGQGTTVTVSSG |
| | | scFc_del | molecule | GGGSGGGGSGGGGSDVVMTQTPLSLPVTLGQPASISCRSSQSLVYRDGNTYLSWFQQRPGQS |
| | | GK | | PRRLIYKVSNWQSGVPDRFSGGGSGTDFTLKISRVEAEDVGVYYCMQGTHWPPTFGQGTKVE |
| | | | | IKSGGGGSEVQLVESGGGLVQPGGSLKLSCAASGFTFNKYAMNWVRQAPGKGLEWVARIRSK |
| | | | | YNNYATYYADSVKDRFTISRDDSKNTAYLQMNNLKTEDTAVYYCVRHGNFGNSYISYWAYWG |
| | | | | QGTLVTVSSGGGGSGGGGSGGGGSQTVVTQEPSLTVSPGGTVTLTCGSSTGAVTSGNYPNWV |
| | | | | QQKPGQAPRGLIGGTKFLAPGTPARFSGSLLGGKAALTLSGVQPEDEAEYYCVLWYSNRWVF |
| | | | | GGGTKLTVLGGGGDKTHTCPPCPAPELLGGPSVFLFPPKPKDTLMISRTPEVTCVVVDVSHE |
| | | | | DPEVKFNWYVDGVEVHNAKTKPCEEQYGSTYRCVSVLTVLHQDWLNGKEYKCKVSNKALPAP |
| | | | | IEKTISKAKGQPREPQVYTLPPSREEMTKNQVSLTCLVKGFYPSDIAVEWESNGQPENNYKT |
| | | | | TPPVLDSDGSFFLYSKLTVDKSRWQQGNVFSCSVMHEALHNHYTQKSLSLSPGGGGSGGGGS |
| | | | | GGGGSGGGGSGGGGSGGGGSDKTHTCPPCPAPELLGGPSVFLFPPKPKDTLMISRTPEVTCV |
| | | | | VVDVSHEDPEVKFNWYVDGVEVHNAKTKPCEEQYGSTYRCVSVLTVLHQDWLNGKEYKCKVS |
| | | | | NKALPAPIEKTISKAKGQPREPQVYTLPPSREEMTKNQVSLTCLVKGFYPSDIAVEWESNGQ |
| | | | | PENNYKTTPPVLDSDGSFFLYSKLTVDKSRWQQGNVFSCSVMHEALHNHYTQKSLSLSPGK |
| 527 | | DLL3-14- | bispecific | QVQLVQSGAEVKKPGASVKVSCKASGYTFTNYYMHWVRQAPGLCLEWMGIINPSDGSTSYAQ |
| | | 012 | (CC) | KFQGRVTMTRDTSTNTVYMDLSSLRSEDTAVYYCARGGNSAFYSYYDMDVWGQGTTVTVSSG |
| | | xI2C - | HLE | GGGSGGGGSGGGGSDVVMTQTPLSLPVTLGQPASISCRSSQSLVYRDGNTYLSWFQQRPGQS |
| | | scFc | molecule | PRRLIYKVSNWQSGVPDRFSGGGSGTDFTLKISRVEAEDVGVYYCMQGTHWPPTFGCGTKVE |
| | | | | IKSGGGGSEVQLVESGGGLVQPGGSLKLSCAASGFTFNKYAMNWVRQAPGKGLEWVARIRSK |
| | | | | YNNYATYYADSVKDRFTISRDDSKNTAYLQMNNLKTEDTAVYYCVRHGNFGNSYISYWAYWG |
| | | | | QGTLVTVSSGGGGSGGGGSGGGGSQTVVTQEPSLTVSPGGTVTLTCGSSTGAVTSGNYPNWV |
| | | | | QQKPGQAPRGLIGGTKFLAPGTPARFSGSLLGGKAALTLSGVQPEDEAEYYCVLWYSNRWVF |
| | | | | GGGTKLTVLGGGGDKTHTCPPCPAPELLGGPSVFLFPPKPKDTLMISRTPEVTCVVVDVSHE |
| | | | | DPEVKFNWYVDGVEVHNAKTKPCEEQYGSTYRCVSVLTVLHQDWLNGKEYKCKVSNKALPAP |
| | | | | IEKTISKAKGQPREPQVYTLPPSREEMTKNQVSLTCLVKGFYPSDIAVEWESNGQPENNYKT |
| | | | | TPPVLDSDGSFFLYSKLTVDKSRWQQGNVFSCSVMHEALHNHYTQKSLSLSPGKGGGGSGGG |
| | | | | GSGGGGSGGGGSGGGGSGGGGSDKTHTCPPCPAPELLGGPSVFLFPPKPKDTLMISRTPEVT |
| | | | | CVVVDVSHEDPEVKFNWYVDGVEVHNAKTKPCEEQYGSTYRCVSVLTVLHQDWLNGKEYKCK |
| | | | | VSNKALPAPIEKTISKAKGQPREPQVYTLPPSREEMTKNQVSLTCLVKGFYPSDIAVEWESN |
| | | | | GQPENNYKTTPPVLDSDGSFFLYSKLTVDKSRWQQGNVFSCSVMHEALHNHYTQKSLSLSPG |
| | | | | K |
| 528 | | DLL3-14- | bispecific | QVQLVQSGAEVKKPGASVKVSCKASGYTFTNYYMHWVRQAPGLCLEWMGIINPSDGSTSYAQ |
| | | 012 (CC) | HLE | KFQGRVTMTRDTSTNTVYMDLSSLRSEDTAVYYCARGGNSAFYSYYDMDVWGQGTTVTVSSG |
| | | xI2C - | molecule | GGGSGGGGSGGGGSDVVMTQTPLSLPVTLGQPASISCRSSQSLVYRDGNTYLSWFQQRPGQS |
| | | scFc_del | | PRRLIYKVSNWQSGVPDRFSGGGSGTDFTLKISRVEAEDVGVYYCMQGTHWPPTFGCGTKVE |
| | | GK | | IKSGGGGSEVQLVESGGGLVQPGGSLKLSCAASGFTFNKYAMNWVRQAPGKGLEWVARIRSK |
| | | | | YNNYATYYADSVKDRFTISRDDSKNTAYLQMNNLKTEDTAVYYCVRHGNFGNSYISYWAYWG |
| | | | | QGTLVTVSSGGGGSGGGGSGGGGSQTVVTQEPSLTVSPGGTVTLTCGSSTGAVTSGNYPNWV |
| | | | | QQKPGQAPRGLIGGTKFLAPGTPARFSGSLLGGKAALTLSGVQPEDEAEYYCVLWYSNRWVF |
| | | | | GGGTKLTVLGGGGDKTHTCPPCPAPELLGGPSVFLFPPKPKDTLMISRTPEVTCVVVDVSHE |
| | | | | DPEVKFNWYVDGVEVHNAKTKPCEEQYGSTYRCVSVLTVLHQDWLNGKEYKCKVSNKALPAP |
| | | | | IEKTISKAKGQPREPQVYTLPPSREEMTKNQVSLTCLVKGFYPSDIAVEWESNGQPENNYKT |
| | | | | TPPVLDSDGSFFLYSKLTVDKSRWQQGNVFSCSVMHEALHNHYTQKSLSLSPGGGGSGGGGS |
| | | | | GGGGSGGGGSGGGGSGGGGSDKTHTCPPCPAPELLGGPSVFLFPPKPKDTLMISRTPEVTCV |
| | | | | VVDVSHEDPEVKFNWYVDGVEVHNAKTKPCEEQYGSTYRCVSVLTVLHQDWLNGKEYKCKVS |
| | | | | NKALPAPIEKTISKAKGQPREPQVYTLPPSREEMTKNQVSLTCLVKGFYPSDIAVEWESNGQ |
| | | | | PENNYKTTPPVLDSDGSFFLYSKLTVDKSRWQQGNVFSCSVMHEALHNHYTQKSLSLSPGK |
| 529 | | DLL3-6- | VH | QVQLQESGPGLVKPSETLSLTCTVSGASISSFYWSWIRQPPGKCLEWIGYIYYSGTTNYNPS |
| | | 001 (CC) | | LKSRVTISVDTSKNQFSLKLSSVTAADTAVYYCARIAVAGFFFDYWGQGTLVTVSS |
| 530 | | DLL3-6- | VL | EIVLTQSPGTLSLSPGERATLSCRASQSVNKNYLAWYQQKPGQAPRLLIYGASSRATGIPDR |
| | | 001 (CC) | | FSGSGSGTDFTLTISRLEPEDFAVYYCQQYDRSPLTFGCGTKVEIK |
| 531 | | DLL3-6- | scFv | QVQLQESGPGLVKPSETLSLTCTVSGASISSFYWSWIRQPPGKCLEWIGYIYYSGTTNYNPS |
| | | 001 (CC) | | LKSRVTISVDTSKNQFSLKLSSVTAADTAVYYCARIAVAGFFFDYWGQGTLVTVSSGGGGSG |
| | | | | GGGSGGGGSEIVLTQSPGTLSLSPGERATLSCRASQSVNKNYLAWYQQKPGQAPRLLIYGAS |
| | | | | SRATGIPDRFSGSGSGTDFTLTISRLEPEDFAVYYCQQYDRSPLTFGCGTKVEIK |
| 532 | | DLL3-6- | bispecific | QVQLQESGPGLVKPSETLSLTCTVSGASISSFYWSWIRQPPGKCLEWIGYIYYSGTTNYNPS |
| | | 001 (CC) | molecule | LKSRVTISVDTSKNQFSLKLSSVTAADTAVYYCARIAVAGFFFDYWGQGTLVTVSSGGGGSG |
| | | xI2C | | GGGSGGGGSEIVLTQSPGTLSLSPGERATLSCRASQSVNKNYLAWYQQKPGQAPRLLIYGAS |
| | | | | SRATGIPDRFSGSGSGTDFTLTISRLEPEDFAVYYCQQYDRSPLTFGCGTKVEIKSGGGGSE |
| | | | | VQLVESGGGLVQPGGSLKLSCAASGFTFNKYAMNWVRQAPGKGLEWVARIRSKYNNYATYYA |
| | | | | DSVKDRFTISRDDSKNTAYLQMNNLKTEDTAVYYCVRHGNFGNSYISYWAYWGQGTLVTVSS |
| | | | | GGGGSGGGGSGGGGSQTVVTQEPSLTVSPGGTVTLTCGSSTGAVTSGNYPNWVQQKPGQAPR |
| | | | | GLIGGTKFLAPGTPARFSGSLLGGKAALTLSGVQPEDEAEYYCVLWYSNRWVFGGGTKLTVL |
| 533 | | Fc | | DKTHTCPPCPAPELLGGPSVFLFPPKPKDTLMISRTPEVTCVVVDVSHEDPEVKFNWYVDGV |
| | | monomer- | | EVHNAKTKPCEEQYGSTYRCVSVLTVLHQDWLNGKEYKCKVSNKALPAPIEKTISKAKGQPR |
| | | 1 | | EPQVYTLPPSREEMTKNQVSLTCLVKGFYPSDIAVEWESNGQPENNYKTTPPVLDSDGSFFL |
| | | +c/−g | | YSKLTVDKSRWQQGNVFSCSVMHEALHNHYTQKSLSLSPGK |
| 534 | | Fc | | DKTHTCPPCPAPELLGGPSVFLFPPKPKDTLMISRTPEVTCVVVDVSHEDPEVKFNWYVDGV |
| | | monomer- | | EVHNAKTKPCEEQYGSTYRCVSVLTVLHQDWLNGKEYKCKVSNKALPAPIEKTISKAKGQPR |
| | | 2 | | EPQVYTLPPSREEMTKNQVSLTCLVKGFYPSDIAVEWESNGQPENNYKTTPPVLDSDGSFFL |
| | | +c/−g/ | | YSKLTVDKSRWQQGNVFSCSVMHEALHNHYTQKSLSLSP |
| | | delGK | | |
| 535 | | Fc | | DKTHTCPPCPAPELLGGPSVFLFPPKPKDTLMISRTPEVTCVVVDVSHEDPEVKFNWYVDGV |
| | | monomer- | | EVHNAKTKPREEQYNSTYRVVSVLTVLHQDWLNGKEYKCKVSNKALPAPIEKTISKAKGQPR |
| | | 3 | | EPQVYTLPPSREEMTKNQVSLTCLVKGFYPSDIAVEWESNGQPENNYKTTPPVLDSDGSFFL |
| | | −c/+g | | YSKLTVDKSRWQQGNVFSCSVMHEALHNHYTQKSLSLSPGK |
| 536 | | Fc | | DKTHTCPPCPAPELLGGPSVFLFPPKPKDTLMISRTPEVTCVVVDVSHEDPEVKFNWYVDGV |
| | | monomer- | | EVHNAKTKPREEQYNSTYRVVSVLTVLHQDWLNGKEYKCKVSNKALPAPIEKTISKAKGQPR |
| | | 4 | | EPQVYTLPPSREEMTKNQVSLTCLVKGFYPSDIAVEWESNGQPENNYKTTPPVLDSDGSFFL |
| | | −c/+g/ | | YSKLTVDKSRWQQGNVFSCSVMHEALHNHYTQKSLSLSP |
| | | delGK | | |
| 537 | | Fc | | DKTHTCPPCPAPELLGGPSVFLFPPKPKDTLMISRTPEVTCVVVDVSHEDPEVKFNWYVDGV |
| | | monomer- | | EVHNAKTKPREEQYGSTYRVVSVLTVLHQDWLNGKEYKCKVSNKALPAPIEKTISKAKGQPR |
| | | 5 | | EPQVYTLPPSREEMTKNQVSLTCLVKGFYPSDIAVEWESNGQPENNYKTTPPVLDSDGSFFL |
| | | −c/−g | | YSKLTVDKSRWQQGNVFSCSVMHEALHNHYTQKSLSLSPGK |
| 538 | | Fc | | DKTHTCPPCPAPELLGGPSVFLFPPKPKDTLMISRTPEVTCVVVDVSHEDPEVKFNWYVDGV |
| | | monomer- | | EVHNAKTKPREEQYGSTYRVVSVLTVLHQDWLNGKEYKCKVSNKALPAPIEKTISKAKGQPR |
| | | 6 | | EPQVYTLPPSREEMTKNQVSLTCLVKGFYPSDIAVEWESNGQPENNYKTTPPVLDSDGSFFL |
| | | −c/−g/ | | YSKLTVDKSRWQQGNVFSCSVMHEALHNHYTQKSLSLSP |
| | | delGK | | |
| 539 | | Fc | | DKTHTCPPCPAPELLGGPSVFLFPPKPKDTLMISRTPEVTCVVVDVSHEDPEVKFNWYVDGV |
| | | monomer- | | EVHNAKTKPCEEQYNSTYRCVSVLTVLHQDWLNGKEYKCKVSNKALPAPIEKTISKAKGQPR |
| | | 7 | | EPQVYTLPPSREEMTKNQVSLTCLVKGFYPSDIAVEWESNGQPENNYKTTPPVLDSDGSFFL |
| | | +c/+g | | YSKLTVDKSRWQQGNVFSCSVMHEALHNHYTQKSLSLSPGK |
| 540 | | Fc | | DKTHTCPPCPAPELLGGPSVFLFPPKPKDTLMISRTPEVTCVVVDVSHEDPEVKFNWYVDGV |
| | | monomer- | | EVHNAKTKPCEEQYNSTYRCVSVLTVLHQDWLNGKEYKCKVSNKALPAPIEKTISKAKGQPR |
| | | 8 | | EPQVYTLPPSREEMTKNQVSLTCLVKGFYPSDIAVEWESNGQPENNYKTTPPVLDSDGSFFL |
| | | +c/+g/ | | YSKLTVDKSRWQQGNVFSCSVMHEALHNHYTQKSLSLSP |
| | | delGK | | |
| 541 | | scFc-1 | | DKTHTCPPCPAPELLGGPSVFLFPPKPKDTLMISRTPEVTCVVVDVSHEDPEVKFNWYVDGV |
| | | | | EVHNAKTKPCEEQYGSTYRCVSVLTVLHQDWLNGKEYKCKVSNKALPAPIEKTISKAKGQPR |
| | | | | EPQVYTLPPSREEMTKNQVSLTCLVKGFYPSDIAVEWESNGQPENNYKTTPPVLDSDGSFFL |
| | | | | YSKLTVDKSRWQQGNVFSCSVMHEALHNHYTQKSLSLSPGKGGGGSGGGGSGGGGSGGGGSG |
| | | | | GGGSGGGGSDKTHTCPPCPAPELLGGPSVFLFPPKPKDTLMISRTPEVTCVVVDVSHEDPEV |
| | | | | KFNWYVDGVEVHNAKTKPCEEQYGSTYRCVSVLTVLHQDWLNGKEYKCKVSNKALPAPIEKT |
| | | | | ISKAKGQPREPQVYTLPPSREEMTKNQVSLTCLVKGFYPSDIAVEWESNGQPENNYKTTPPV |
| | | | | LDSDGSFFLYSKLTVDKSRWQQGNVFSCSVMHEALHNHYTQKSLSLSPGK |
| 542 | | scFc-2 | | DKTHTCPPCPAPELLGGPSVFLFPPKPKDTLMISRTPEVTCVVVDVSHEDPEVKFNWYVDGV |
| | | | | EVHNAKTKPCEEQYGSTYRCVSVLTVLHQDWLNGKEYKCKVSNKALPAPIEKTISKAKGQPR |
| | | | | EPQVYTLPPSREEMTKNQVSLTCLVKGFYPSDIAVEWESNGQPENNYKTTPPVLDSDGSFFL |
| | | | | YSKLTVDKSRWQQGNVFSCSVMHEALHNHYTQKSLSLSPGGGGSGGGGSGGGGSGGGGSGGG |
| | | | | GSGGGGSDKTHTCPPCPAPELLGGPSVFLFPPKPKDTLMISRTPEVTCVVVDVSHEDPEVKF |
| | | | | NWYVDGVEVHNAKTKPCEEQYGSTYRCVSVLTVLHQDWLNGKEYKCKVSNKALPAPIEKTIS |
| | | | | KAKGQPREPQVYTLPPSREEMTKNQVSLTCLVKGFYPSDIAVEWESNGQPENNYKTTPPVLD |
| | | | | SDGSFFLYSKLTVDKSRWQQGNVFSCSVMHEALHNHYTQKSLSLSP |
| 543 | | scFc-3 | | DKTHTCPPCPAPELLGGPSVFLFPPKPKDTLMISRTPEVTCVVVDVSHEDPEVKFNWYVDGV |
| | | | | EVHNAKTKPREEQYNSTYRVVSVLTVLHQDWLNGKEYKCKVSNKALPAPIEKTISKAKGQPR |
| | | | | EPQVYTLPPSREEMTKNQVSLTCLVKGFYPSDIAVEWESNGQPENNYKTTPPVLDSDGSFFL |
| | | | | YSKLTVDKSRWQQGNVFSCSVMHEALHNHYTQKSLSLSPGKGGGGSGGGGSGGGGSGGGGSG |
| | | | | GGGSGGGGSDKTHTCPPCPAPELLGGPSVFLFPPKPKDTLMISRTPEVTCVVVDVSHEDPEV |
| | | | | KFNWYVDGVEVHNAKTKPREEQYNSTYRVVSVLTVLHQDWLNGKEYKCKVSNKALPAPIEKT |
| | | | | ISKAKGQPREPQVYTLPPSREEMTKNQVSLTCLVKGFYPSDIAVEWESNGQPENNYKTTPPV |
| | | | | LDSDGSFFLYSKLTVDKSRWQQGNVFSCSVMHEALHNHYTQKSLSLSPGK |
| 544 | | scFc-4 | | DKTHTCPPCPAPELLGGPSVFLFPPKPKDTLMISRTPEVTCVVVDVSHEDPEVKFNWYVDGV |
| | | | | EVHNAKTKPREEQYNSTYRVVSVLTVLHQDWLNGKEYKCKVSNKALPAPIEKTISKAKGQPR |
| | | | | EPQVYTLPPSREEMTKNQVSLTCLVKGFYPSDIAVEWESNGQPENNYKTTPPVLDSDGSFFL |
| | | | | YSKLTVDKSRWQQGNVFSCSVMHEALHNHYTQKSLSLSPGGGGSGGGGSGGGGSGGGGSGGG |
| | | | | GSGGGGSDKTHTCPPCPAPELLGGPSVFLFPPKPKDTLMISRTPEVTCVVVDVSHEDPEVKF |
| | | | | NWYVDGVEVHNAKTKPREEQYNSTYRVVSVLTVLHQDWLNGKEYKCKVSNKALPAPIEKTIS |
| | | | | KAKGQPREPQVYTLPPSREEMTKNQVSLTCLVKGFYPSDIAVEWESNGQPENNYKTTPPVLD |
| | | | | SDGSFFLYSKLTVDKSRWQQGNVFSCSVMHEALHNHYTQKSLSLSP |
| 545 | | scFc-5 | | DKTHTCPPCPAPELLGGPSVFLFPPKPKDTLMISRTPEVTCVVVDVSHEDPEVKFNWYVDGV |
| | | | | EVHNAKTKPREEQYGSTYRVVSVLTVLHQDWLNGKEYKCKVSNKALPAPIEKTISKAKGQPR |
| | | | | EPQVYTLPPSREEMTKNQVSLTCLVKGFYPSDIAVEWESNGQPENNYKTTPPVLDSDGSFFL |
| | | | | YSKLTVDKSRWQQGNVFSCSVMHEALHNHYTQKSLSLSPGKGGGGSGGGGSGGGGSGGGGSG |
| | | | | GGGSGGGGSDKTHTCPPCPAPELLGGPSVFLFPPKPKDTLMISRTPEVTCVVVDVSHEDPEV |
| | | | | KFNWYVDGVEVHNAKTKPREEQYGSTYRVVSVLTVLHQDWLNGKEYKCKVSNKALPAPIEKT |
| | | | | ISKAKGQPREPQVYTLPPSREEMTKNQVSLTCLVKGFYPSDIAVEWESNGQPENNYKTTPPV |
| | | | | LDSDGSFFLYSKLTVDKSRWQQGNVFSCSVMHEALHNHYTQKSLSLSPGK |
| 546 | | scFc-6 | | DKTHTCPPCPAPELLGGPSVFLFPPKPKDTLMISRTPEVTCVVVDVSHEDPEVKFNWYVDGV |
| | | | | EVHNAKTKPREEQYGSTYRVVSVLTVLHQDWLNGKEYKCKVSNKALPAPIEKTISKAKGQPR |
| | | | | EPQVYTLPPSREEMTKNQVSLTCLVKGFYPSDIAVEWESNGQPENNYKTTPPVLDSDGSFFL |
| | | | | YSKLTVDKSRWQQGNVFSCSVMHEALHNHYTQKSLSLSPGGGGSGGGGSGGGGSGGGGSGGG |
| | | | | GSGGGGSDKTHTCPPCPAPELLGGPSVFLFPPKPKDTLMISRTPEVTCVVVDVSHEDPEVKF |
| | | | | NWYVDGVEVHNAKTKPREEQYGSTYRVVSVLTVLHQDWLNGKEYKCKVSNKALPAPIEKTIS |
| | | | | KAKGQPREPQVYTLPPSREEMTKNQVSLTCLVKGFYPSDIAVEWESNGQPENNYKTTPPVLD |
| | | | | SDGSFFLYSKLTVDKSRWQQGNVFSCSVMHEALHNHYTQKSLSLSP |
| 547 | | scFc-7 | | DKTHTCPPCPAPELLGGPSVFLFPPKPKDTLMISRTPEVTCVVVDVSHEDPEVKFNWYVDGV |
| | | | | EVHNAKTKPCEEQYNSTYRCVSVLTVLHQDWLNGKEYKCKVSNKALPAPIEKTISKAKGQPR |
| | | | | EPQVYTLPPSREEMTKNQVSLTCLVKGFYPSDIAVEWESNGQPENNYKTTPPVLDSDGSFFL |
| | | | | YSKLTVDKSRWQQGNVFSCSVMHEALHNHYTQKSLSLSPGKGGGGSGGGGSGGGGSGGGGSG |
| | | | | GGGSGGGGSDKTHTCPPCPAPELLGGPSVFLFPPKPKDTLMISRTPEVTCVVVDVSHEDPEV |
| | | | | KFNWYVDGVEVHNAKTKPCEEQYNSTYRCVSVLTVLHQDWLNGKEYKCKVSNKALPAPIEKT |
| | | | | ISKAKGQPREPQVYTLPPSREEMTKNQVSLTCLVKGFYPSDIAVEWESNGQPENNYKTTPPV |
| | | | | LDSDGSFFLYSKLTVDKSRWQQGNVFSCSVMHEALHNHYTQKSLSLSPGK |
| 548 | | scFc-8 | | DKTHTCPPCPAPELLGGPSVFLFPPKPKDTLMISRTPEVTCVVVDVSHEDPEVKFNWYVDGV |
| | | | | EVHNAKTKPCEEQYNSTYRCVSVLTVLHQDWLNGKEYKCKVSNKALPAPIEKTISKAKGQPR |
| | | | | EPQVYTLPPSREEMTKNQVSLTCLVKGFYPSDIAVEWESNGQPENNYKTTPPVLDSDGSFFL |
| | | | | YSKLTVDKSRWQQGNVFSCSVMHEALHNHYTQKSLSLSPGGGGSGGGGSGGGGSGGGGSGGG |
| | | | | GSGGGGSDKTHTCPPCPAPELLGGPSVFLFPPKPKDTLMISRTPEVTCVVVDVSHEDPEVKF |
| | | | | NWYVDGVEVHNAKTKPCEEQYNSTYRCVSVLTVLHQDWLNGKEYKCKVSNKALPAPIEKTIS |
| | | | | KAKGQPREPQVYTLPPSREEMTKNQVSLTCLVKGFYPSDIAVEWESNGQPENNYKTTPPVLD |
| | | | | SDGSFFLYSKLTVDKSRWQQGNVFSCSVMHEALHNHYTQKSLSLSP |
| 549 | | (G₄S)₄ | | GGGGSGGGGSGGGGSGGGGS |
| | | linker | | |
| 550 | | (G₄S)₅ | | GGGGSGGGGSGGGGSGGGGSGGGGS |
| | | linker | | |
| 551 | | (G₄S)₆ | | GGGGSGGGGSGGGGSGGGGSGGGGSGGGGS |
| | | linker | | |
| 552 | | (G₄S)₇ | | GGGGSGGGGSGGGGSGGGGSGGGGSGGGGSGGGGS |
| | | linker | | |
| 553 | | (G₄S)₈ | | GGGGSGGGGSGGGGSGGGGSGGGGSGGGGSGGGGSGGGGS |
| | | linker | | |
| 554 | | DLL3-22 | bispecific | QVQLQESGPGLVKPSETLSLTCTVSGDSISSYYWTWIRQPPGKGLEWIGYIYYSGTTNYNPS |
| | | | molecule | LKSRVTISVDTSKSQFSLKLSSVTAADTAVYYCASIAVRGEFFDYWGQGTLVTVSSGGGGSG |
| | | | | GGGSGGGGSEIVLTQSPGTLSLSPGERATLSCRASQSVSSSYLAWYQQKPGQAPRLLIYGAS |
| | | | | TRATGIPDRFSGSGSGTDFTLTISRLEPEDFAVYYCQQYGTSPLTEGGGTKVEIKRSGGGGS |
| | | | | EVQLVESGGGLVQPGGSLKLSCAASGFTENKYAMNWVRQAPGKGLEWVARIRSKYNNYATYY |
| | | | | ADSVKDRFTISRDDSKNTAYLQMNNLKTEDTAVYYCVRHGNEGNSYISYWAYWGQGTLVTVS |
| | | | | SGGGGSGGGGSGGGGSQTVVTQEPSLTVSPGGTVTLTCGSSTGAVTSGNYPNWVQQKPGQAP |
| | | | | RGLIGGTKFLAPGTPARFSGSLLGGKAALTLSGVQPEDEAEYYCVLWYSNRWVEGGGTKLTV |
| | | | | LHHHHHH |

1. A polypeptide comprising a first binding domain which binds to human delta-like 3 (DLL3) on the surface of a target cell and a second binding domain which binds to human CD3 on the surface of a T cell, wherein the first binding domain binds to an epitope of DLL3 comprised within the amino acid sequence of SEQ ID NO: 259.

2. The polypeptide according to claim 1, wherein the first binding domain further binds to macaque DLL3.

3. The polypeptide according to claim 1 or 2, wherein the second binding domain binds to human CD3 epsilon and to Callithrix jacchus, Saguinus oedipus or Saimiri sciureus CD3 epsilon.

4. The polypeptide according to claim 1 or 32, wherein the antibody construct is in a format selected from the group consisting of (scFv)₂, scFv-single domain mAb, a diabody, and oligomers of the foregoing formats.

5-28. (canceled)

29. The polypeptide according to claim 4, wherein the antibody construct is in the format of (scFv)₂.

30. The polypeptide according to claim 4, wherein the antibody construct is in the format of scFv-single domain mAb.

31. The polypeptide according to claim 4, wherein the antibody construct is in the format of a diabody.

32. The polypeptide according to claim 1, wherein the first binding domain comprises a VH region comprising CDR-H1, CDR-H2 and CDR-H3 and a VL region comprising CDR-L1, CDR-L2 and CDR-L3 selected from the group consisting of:
a) CDR-H1 comprising the amino acid sequence of SEQ ID NO: 121, CDR-H2 comprising the amino acid sequence of SEQ ID NO: 122, CDR-H3 comprising the amino acid sequence of SEQ ID NO: 123, CDR-L1 comprising the amino acid sequence of SEQ ID NO: 124, CDR-L2 comprising the amino acid sequence of SEQ ID NO: 125 and CDR-L3 comprising the amino acid sequence of SEQ ID NO: 126;
b) CDR-H1 comprising the amino acid sequence of SEQ ID NO: 131, CDR-H2 comprising the amino acid sequence of SEQ ID NO: 132, CDR-H3 comprising the amino acid sequence of SEQ ID NO: 133, CDR-L1 comprising the amino acid sequence of SEQ ID NO: 134, CDR-L2 comprising the amino acid sequence of SEQ ID NO: 135 and CDR-L3 comprising the amino acid sequence of SEQ ID NO: 136;
c) CDR-H1 comprising the amino acid sequence of SEQ ID NO: 141, CDR-H2 comprising the amino acid sequence of SEQ ID NO: 142, CDR-H3 comprising the amino acid sequence of SEQ ID NO: 143, CDR-L1 comprising the amino acid sequence of SEQ ID NO: 144, CDR-L2 comprising the amino acid sequence of SEQ ID NO: 145 and CDR-L3 comprising the amino acid sequence of SEQ ID NO: 146;
d) CDR-H1 comprising the amino acid sequence of SEQ ID NO: 151, CDR-H2 comprising the amino acid sequence of SEQ ID NO: 152, CDR-H3 comprising the amino acid sequence of SEQ ID NO: 153, CDR-L1 comprising the amino acid sequence of SEQ ID NO: 154, CDR-L2 comprising the amino acid sequence of SEQ ID NO: 155 and CDR-L3 comprising the amino acid sequence of SEQ ID NO: 156;
e) CDR-H1 comprising the amino acid sequence of SEQ ID NO: 161, CDR-H2 comprising the amino acid sequence of SEQ ID NO: 162, CDR-H3 comprising the amino acid sequence of SEQ ID NO: 163, CDR-L1 comprising the amino acid sequence of SEQ ID NO: 164, CDR-L2 comprising the amino acid sequence of SEQ ID NO: 165 and CDR-L3 comprising the amino acid sequence of SEQ ID NO: 166;
f) CDR-H1 comprising the amino acid sequence of SEQ ID NO: 131, CDR-H2 comprising the amino acid sequence of SEQ ID NO: 439, CDR-H3 comprising the amino acid sequence of SEQ ID NO: 133, CDR-L1 comprising the amino acid sequence of SEQ ID NO: 134, CDR-L2 comprising the amino acid sequence of SEQ ID NO: 135 and CDR-L3 comprising the amino acid sequence of SEQ ID NO: 136;
g) CDR-H1 comprising the amino acid sequence of SEQ ID NO: 131, CDR-H2 comprising the amino acid sequence of SEQ ID NO: 440, CDR-H3 comprising the amino acid sequence of SEQ ID NO: 133, CDR-L1 comprising the amino acid sequence of SEQ ID NO: 134, CDR-L2 comprising the amino acid sequence of SEQ ID NO: 135 and CDR-L3 comprising the amino acid sequence of SEQ ID NO: 136;
h) CDR-H1 comprising the amino acid sequence of SEQ ID NO: 131, CDR-H2 comprising the amino acid sequence of SEQ ID NO: 132, CDR-H3 comprising the amino acid sequence of SEQ ID NO: 133, CDR-L1 comprising the amino acid sequence of SEQ ID NO: 441, CDR-L2 comprising the amino acid sequence of SEQ ID NO: 135 and CDR-L3 comprising the amino acid sequence of SEQ ID NO: 136;
i) CDR-H1 comprising the amino acid sequence of SEQ ID NO: 131, CDR-H2 comprising the amino acid sequence of SEQ ID NO: 132, CDR-H3 comprising the amino acid sequence of SEQ ID NO: 133, CDR-L1 comprising the amino acid sequence of SEQ ID NO: 442, CDR-L2 comprising the amino acid sequence of SEQ ID NO: 135 and CDR-L3 comprising the amino acid sequence of SEQ ID NO: 136;
j) CDR-H1 comprising the amino acid sequence of SEQ ID NO: 131, CDR-H2 comprising the amino acid sequence of SEQ ID NO: 132, CDR-H3 comprising the amino acid sequence of SEQ ID NO: 133, CDR-L1 comprising the amino acid sequence of SEQ ID NO: 443, CDR-L2 comprising the amino acid sequence of SEQ ID NO: 135 and CDR-L3 comprising the amino acid sequence of SEQ ID NO: 136;
k) CDR-H1 comprising the amino acid sequence of SEQ ID NO: 131, CDR-H2 comprising the amino acid sequence of SEQ ID NO: 132, CDR-H3 comprising the amino acid sequence of SEQ ID NO: 133, CDR-L1 comprising the amino acid sequence of SEQ ID NO: 444, CDR-L2 comprising the amino acid sequence of SEQ ID NO: 135 and CDR-L3 comprising the amino acid sequence of SEQ ID NO: 136;
l) CDR-H1 comprising the amino acid sequence of SEQ ID NO: 131, CDR-H2 comprising the amino acid sequence of SEQ ID NO: 439, CDR-H3 comprising the amino acid sequence of SEQ ID NO: 133, CDR-L1 comprising the amino acid sequence of SEQ ID NO: 441, CDR-L2 comprising the amino acid sequence of SEQ ID NO: 135 and CDR-L3 comprising the amino acid sequence of SEQ ID NO: 136; and
m) CDR-H1 comprising the amino acid sequence of SEQ ID NO: 131, CDR-H2 comprising the amino acid sequence of SEQ ID NO: 440, CDR-H3 comprising the amino acid sequence of SEQ ID NO: 133, CDR-L1 comprising the amino acid sequence of SEQ ID NO: 442, CDR-L2 comprising the amino acid sequence of SEQ ID NO: 135 and CDR-L3 comprising the amino acid sequence of SEQ ID NO: 136.

33. The polypeptide according to claim 1, wherein the first binding domain comprises a VH region comprising the amino acid sequence of SEQ ID NO: 127, SEQ ID NO: 137, SEQ ID NO: 147, SEQ ID NO: 157, SEQ ID NO: 167, SEQ ID NO: 445, SEQ ID NO: 446, SEQ ID NO: 447, SEQ ID NO: 448, SEQ ID NO: 449, SEQ ID NO: 450, SEQ ID NO: 451, SEQ ID NO: 452, SEQ ID NO: 453, SEQ ID NO: 454, or SEQ ID NO: 455.

34. The polypeptide according to claim 1, wherein the first binding domain comprises a VL region comprising the amino acid sequence of SEQ ID NO: 128, SEQ ID NO: 138, SEQ ID NO: 148, SEQ ID NO: 158, SEQ ID NO: 168, SEQ ID NO: 456, SEQ ID NO: 457, SEQ ID NO: 458, SEQ ID NO: 459, SEQ ID NO: 460, SEQ ID NO: 461, SEQ ID NO: 462, SEQ ID NO: 463, SEQ ID NO: 464, SEQ ID NO: 465, SEQ ID NO: 466, SEQ ID NO: 467, SEQ ID NO: 468, SEQ ID NO: 469, or SEQ ID NO: 470.

35. The polypeptide according to claim 1, wherein the first binding domain comprises a VH region and a VL region comprising the pair of amino acid sequences, respectively, of SEQ ID NOs: 127 and 128; SEQ ID NOs: 137 and 138; SEQ ID NOs: 147 and 148; SEQ ID NOs: 157 and 158; SEQ ID NOs: 167 and 168; SEQ ID NOs: 137 and 456; SEQ ID NOs: 137 and 457; SEQ ID NOs: 137 and 458; SEQ ID NOs: 137 and 459; SEQ ID NOs: 137 and 460; SEQ ID NOs: 445 and 138; SEQ ID NOs: 446 and 138; SEQ ID NOs: 447 and 138; SEQ ID NOs: 445 and 460; SEQ ID NOs: 448 and 461; SEQ ID NOs: 449 and 462; SEQ ID NOs: 450 and 463; SEQ ID NOs: 450 and 464; SEQ ID NOs: 450 and 465; SEQ ID NOs: 450 and 466; SEQ ID NOs: 450 and 467; SEQ ID NOs: 450 and 468; SEQ ID NOs: 451 and 463; SEQ ID NOs: 452 and 463; SEQ ID NOs: 453 and 463; SEQ ID NOs: 451 and 468; SEQ ID NOs: 454 and 469; or SEQ ID NOs: 455 and 470.

36. The polypeptide according to claim 1, wherein the first binding domain comprises the amino acid sequence of SEQ ID NO: 129, SEQ ID NO: 139, SEQ ID NO: 149, SEQ ID NO: 159, SEQ ID NO: 169, SEQ ID NO: 471, SEQ ID NO: 472, SEQ ID NO: 473, SEQ ID NO: 474, SEQ ID NO: 475, SEQ ID NO: 476, SEQ ID NO: 477, SEQ ID NO: 478, SEQ ID NO: 479, SEQ ID NO: 480, SEQ ID NO: 481, SEQ ID NO: 482, SEQ ID NO: 483, SEQ ID NO: 484, SEQ ID NO: 485, SEQ ID NO: 486, SEQ ID NO: 487, SEQ ID NO: 488, SEQ ID NO: 489, SEQ ID NO: 490, SEQ ID NO: 491, SEQ ID NO: 492, or SEQ ID NO: 493.

37. The polypeptide according to claim 1 comprising the amino acid sequence of SEQ ID NO: 130, SEQ ID NO: 140, SEQ ID NO: 150, SEQ ID NO: 160, SEQ ID NO: 170; SEQ ID NO: 218, SEQ ID NO: 219, SEQ ID NO: 220, SEQ ID NO: 494, SEQ ID NO: 495, SEQ ID NO: 496, SEQ ID NO: 497, SEQ ID NO: 498, SEQ ID NO: 499, SEQ ID NO: 500, SEQ ID NO: 501, SEQ ID NO: 502, SEQ ID NO: 503, SEQ ID NO: 504, SEQ ID NO: 505, SEQ ID NO: 506, SEQ ID NO: 507, SEQ ID NO: 508, SEQ ID NO: 509, SEQ ID NO: 510, SEQ ID NO: 511, SEQ ID NO: 512, SEQ ID NO: 513, SEQ ID NO: 514, SEQ ID NO: 515, or SEQ ID NO: 516.

38. The polypeptide according to claim 2, wherein the macaque is Macaca fascicularis.

39. The polypeptide according to claim 1 or 32, wherein the second binding domain comprises a VL region comprising CDR-H1, CDR-H2 and CDR-H3 and a VH region comprising CDR-L1, CDR-L2 and CDR-L3 selected from the group consisting of:
a) CDR-L1 comprising the amino acid sequence of SEQ ID NO: 342, CDR-L2 comprising the amino acid sequence of SEQ ID NO: 343, CDR-L3 comprising the amino acid sequence of SEQ ID NO: 344; CDR-H1 comprising the amino acid sequence of SEQ ID NO: 345, CDR-H2 comprising the amino acid sequence of SEQ ID NO: 346, and CDR-H3 comprising the amino acid sequence of SEQ ID NO: 347;
b) CDR-L1 comprising the amino acid sequence of SEQ ID NO: 351, CDR-L2 comprising the amino acid sequence of SEQ ID NO: 352, CDR-L3 comprising the amino acid sequence of SEQ ID NO: 353; CDR-H1 comprising the amino acid sequence of SEQ ID NO: 354, CDR-H2 comprising the amino acid sequence of SEQ ID NO: 355, and CDR-H3 comprising the amino acid sequence of SEQ ID NO: 356;
c) CDR-L1 comprising the amino acid sequence of SEQ ID NO: 360, CDR-L2 comprising the amino acid sequence of SEQ ID NO: 361, CDR-L3 comprising the amino acid sequence of SEQ ID NO: 362; CDR-H1 comprising the amino acid sequence of SEQ ID NO: 363, CDR-H2 comprising the amino acid sequence of SEQ ID NO: 364, and CDR-H3 comprising the amino acid sequence of SEQ ID NO: 365;
d) CDR-L1 comprising the amino acid sequence of SEQ ID NO: 369, CDR-L2 comprising the amino acid sequence of SEQ ID NO: 370, CDR-L3 comprising the amino acid sequence of SEQ ID NO: 371; CDR-H1 comprising the amino acid sequence of SEQ ID NO: 372, CDR-H2 comprising the amino acid sequence of SEQ ID NO: 373, and CDR-H3 comprising the amino acid sequence of SEQ ID NO: 374;
e) CDR-L1 comprising the amino acid sequence of SEQ ID NO: 378, CDR-L2 comprising the amino acid sequence of SEQ ID NO: 379, CDR-L3 comprising the amino acid sequence of SEQ ID NO: 380; CDR-H1 comprising the amino acid sequence of SEQ ID NO: 381, CDR-H2 comprising the amino acid sequence of SEQ ID NO: 382, and CDR-H3 comprising the amino acid sequence of SEQ ID NO: 383;
f) CDR-L1 comprising the amino acid sequence of SEQ ID NO: 387, CDR-L2 comprising the amino acid sequence of SEQ ID NO: 388, CDR-L3 comprising the amino acid sequence of SEQ ID NO: 389; CDR-H1 comprising the amino acid sequence of SEQ ID NO: 390, CDR-H2 comprising the amino acid sequence of SEQ ID NO: 391, and CDR-H3 comprising the amino acid sequence of SEQ ID NO: 392;
g) CDR-L1 comprising the amino acid sequence of SEQ ID NO: 396, CDR-L2 comprising the amino acid sequence of SEQ ID NO: 397, CDR-L3 comprising the amino acid sequence of SEQ ID NO: 398; CDR-H1 comprising the amino acid sequence of SEQ ID NO: 399, CDR-H2 comprising the amino acid sequence of SEQ ID NO: 400, and CDR-H3 comprising the amino acid sequence of SEQ ID NO: 401;
h) CDR-L1 comprising the amino acid sequence of SEQ ID NO: 405, CDR-L2 comprising the amino acid sequence of SEQ ID NO: 406, CDR-L3 comprising the amino acid sequence of SEQ ID NO: 407; CDR-H1 comprising the amino acid sequence of SEQ ID NO: 408, CDR-H2 comprising the amino acid sequence of SEQ ID NO: 409, and CDR-H3 comprising the amino acid sequence of SEQ ID NO: 410; and
i) CDR-L1 comprising the amino acid sequence of SEQ ID NO: 414, CDR-L2 comprising the amino acid sequence of SEQ ID NO: 415, CDR-L3 comprising the amino acid sequence of SEQ ID NO: 416; CDR-H1 comprising the amino acid sequence of SEQ ID NO: 417, CDR-H2 comprising the amino acid sequence of SEQ ID NO: 418, and CDR-H3 comprising the amino acid sequence of SEQ ID NO: 419; and
j) CDR-L1 comprising the amino acid sequence of SEQ ID NO: 423, CDR-L2 comprising the amino acid sequence of SEQ ID NO: 424, CDR-L3 comprising the amino acid sequence of SEQ ID NO: 425; CDR-H1 comprising the amino acid sequence of SEQ ID NO: 426, CDR-H2 comprising the amino acid sequence of SEQ ID NO: 427, and CDR-H3 comprising the amino acid sequence of SEQ ID NO: 428.

40. The polypeptide according to claim 1 or 32, wherein the second binding domain comprises a VL region comprising the amino acid sequence of SEQ ID NO: 349, SEQ ID NO: 358, SEQ ID NO: 367, SEQ ID NO: 376, SEQ ID NO: 385, SEQ ID NO: 394, SEQ ID NO: 403, SEQ ID NO: 412, SEQ ID NO: 421, or SEQ ID NO: 430.

41. The polypeptide according to claim 1 or 32, wherein the second binding domain comprises a VH region comprising the amino acid sequence of SEQ ID NO: 348, SEQ ID NO: 357, SEQ ID NO: 366, SEQ ID NO: 375, SEQ ID NO: 384, SEQ ID NO: 393, SEQ ID NO: 402, SEQ ID NO: 411, SEQ ID NO: 420, or SEQ ID NO: 429.

42. The polypeptide according to claim 1 or 32, wherein the second binding domain comprises a VH region and a VL region comprising the pair of amino acid sequences, respectively, of SEQ ID NOs: 348 and 349; SEQ ID NOs: 357 and 358; SEQ ID NOs: 366 and 367; SEQ ID NOs: 375 and 376; SEQ ID NOs: 384 and 385; SEQ ID NOs: 393 and 394; SEQ ID NOs: 402 and 403; SEQ ID NOs: 411 and 412; SEQ ID NOs: 420 and 421; or SEQ ID NOs: 429 and 430.

43. The polypeptide according to claim 1 or 32, wherein the second binding domain comprises the amino acid sequence of SEQ ID NO: 350, SEQ ID NO: 359, SEQ ID NO: 368, SEQ ID NO: 377, SEQ ID NO: 386, SEQ ID NO: 395, SEQ ID NO: 404, SEQ ID NO: 413, SEQ ID NO: 422, or SEQ ID NO: 431.

44. A composition comprising the polypeptide according to claim 1 or 32.

45. A method for treating or ameliorating a tumor or cancer disease expressing DLL3, comprising the step of administering to a subject in need thereof an effective amount of the polypeptide according to claim 1 or 32.

46. The method according to claim 45, wherein the tumor or cancer disease is
(a) a tumor or cancer of the lung, breast, cervix, colon, endometrium, head and neck, liver, ovary, pancreas, prostate, skin, gastrointestinal system, testis, thyroid, adrenal, kidney, bladder, uterus, esophagus, urothelium, or brain;
(b) a lymphoma, carcinoma, or sarcoma; or
(c) a metastatic cancer disease derived from any of the foregoing of (a) or (b).

47. The method according to claim 46, wherein the tumor or cancer is small cell lung cancer (SCLC), non-small cell lung cancer (NSCLC), glioma, glioblastoma, melanoma, neuroendocrine prostate cancer, neuroendocrine pancreatic cancer, hepatoblastoma, or hepatocellular carcinoma.

48. A kit comprising the polypeptide of claim 1 or 32 and a recipient and, optionally, directions for use.

49. The polypeptide according to claim 1 or 2, wherein the second binding domain further binds to macaque CD3.

50. The polypeptide according to claim 49, wherein the macaque CD3 is Macaca fascicularis CD3.

51. The polypeptide according to claim 2, wherein the macaque DLL3 is Macaca fascicularis DLL3.

52. The polypeptide according to claim 1 or 2, wherein the first binding domain binds to human DLL3 and to Callithrix jacchus, Saguinus oedipus or Saimiri sciureus DLL3.

The application's sequence listing, which the Patent Office published only in electronic form, follows.

SEQUENCE LISTING (576 sequences)

SEQ ID NO: 1 - protein, 5 aa, Artificial Sequence
  Synthetic peptide
DYGIH

SEQ ID NO: 2 - protein, 17 aa, Artificial Sequence
  Synthetic peptide
VISYHGSNKYYARSVKG

SEQ ID NO: 3 - protein, 8 aa, Artificial Sequence
  Synthetic peptide
EIPFGMDV

SEQ ID NO: 4 - protein, 16 aa, Artificial Sequence
  Synthetic peptide
RSSQSLLHSDGYNYLD

SEQ ID NO: 5 - protein, 7 aa, Artificial Sequence
  Synthetic peptide
LGSNRAS

SEQ ID NO: 6 - protein, 9 aa, Artificial Sequence
  Synthetic peptide
MQALQTPLT

SEQ ID NO: 7 - protein, 117 aa, Artificial Sequence
  Synthetic peptide
QVQLVESGGGVVQSGRSLRLSCAASGFTFSDYGIHWVRQAPGKGLEWVAVISYHGSNKYYARSVKGRFTVSRDNSKNTLYLQMNSLRAEDTAVYYCAREIPFGMDVWGQGTTVTVSS

SEQ ID NO: 8 - protein, 112 aa, Artificial Sequence
  Synthetic peptide
DIVMTQTPLSLPVTPGEPASISCRSSQSLLHSDGYNYLDWYLQKPGQSPQLLIYLGSNRASGVPDRFSGSGSGTDFTLTISRVEAEDVGVYYCMQALQTPLTFGGGTKVDIK

SEQ ID NO: 9 - protein, 244 aa, Artificial Sequence
  Synthetic peptide
QVQLVESGGGVVQSGRSLRLSCAASGFTFSDYGIHWVRQAPGKGLEWVAVISYHGSNKYYARSVKGRFTVSRDNSKNTLYLQMNSLRAEDTAVYYCAREIPFGMDVWGQGTTVTVSSGGGGSGGGGSGGGGSDIVMTQTPLSLPVTPGEPASISCRSSQSLLHSDGYNYLDWYLQKPGQSPQLLIYLGSNRASGVPDRFSGSGSGTDFTLTISRVEAEDVGVYYCMQALQTPLTFGGGTKVDIK

SEQ ID NO: 10 - protein, 499 aa, Artificial Sequence
  Synthetic peptide
QVQLVESGGGVVQSGRSLRLSCAASGFTFSDYGIHWVRQAPGKGLEWVAVISYHGSNKYYARSVKGRFTVSRDNSKNTLYLQMNSLRAEDTAVYYCAREIPFGMDVWGQGTTVTVSSGGGGSGGGGSGGGGSDIVMTQTPLSLPVTPGEPASISCRSSQSLLHSDGYNYLDWYLQKPGQSPQLLIYLGSNRASGVPDRFSGSGSGTDFTLTISRVEAEDVGVYYCMQALQTPLTFGGGTKVDIKSGGGGSEVQLVESGGGLVQPGGSLKLSCAASGFTFNKYAMNWVRQAPGKGLEWVARIRSKYNNYATYYADSVKDRFTISRDDSKNTAYLQMNNLKTEDTAVYYCVRHGNFGNSYISYWAYWGQGTLVTVSSGGGGSGGGGSGGGGSQTVVTQEPSLTVSPGGTVTLTCGSSTGAVTSGNYPNWVQQKPGQAPRGLIGGTKFLAPGTPARFSGSLLGGKAALTLSGVQPEDEAEYYCVLWYSNRWVFGGGTKLTVL

SEQ ID NO: 11 - protein, 5 aa, Artificial Sequence
  Synthetic peptide
GYYMH

SEQ ID NO: 12 - protein, 17 aa, Artificial Sequence
  Synthetic peptide
WINPNSGDTNYAQKFQG

SEQ ID NO: 13 - protein, 12 aa, Artificial Sequence
  Synthetic peptide
DANIAALDAFEI

SEQ ID NO: 14 - protein, 11 aa, Artificial Sequence
  Synthetic peptide
RASQSISSYLN

SEQ ID NO: 15 - protein, 7 aa, Artificial Sequence
  Synthetic peptide
AASSLQS

SEQ ID NO: 16 - protein, 9 aa, Artificial Sequence
  Synthetic peptide
QQSYSTPLT

SEQ ID NO: 17 - protein, 121 aa, Artificial Sequence
  Synthetic peptide
QVQLVQSGAEVKKPGASVKVSCKASGYTFTGYYMHWVRQAPGQGLEWMGWINPNSGDTNYAQKFQGRVTMTRDTSISTAYMELSRLTSDDTAVYYCARDANIAALDAFEIWGQGTMVTVSS

SEQ ID NO: 18 - protein, 107 aa, Artificial Sequence [sequence omitted]

SEQ ID NO: 19 - protein, 243 aa, Artificial Sequence
  Synthetic peptide
QVQLVQSGAEVKKPGASVKVSCKASGYTFTGYYMHWVRQAPGQGLEWMGWINPNSGDTNYAQKFQGRVTMTRDTSISTAYMELSRLTSDDTAVYYCARDANIAALDAFEIWGQGTMVTVSSGGGGSGGGGSGGGGSDIQMTQSPSSLSASVGDRVTITCRASQSISSYLNWYQQKPGKAPKLLIYAASSLQSGVPSRFSGSGSGTDFTLTISSLQPEDFATYYCQQSYSTPLTFGGGTKVEIK

SEQ ID NO: 20 - protein, 498 aa, Artificial Sequence
  Synthetic peptide
QVQLVQSGAEVKKPGASVKVSCKASGYTFTGYYMHWVRQAPGQGLEWMGWINPNSGDTNYAQKFQGRVTMTRDTSISTAYMELSRLTSDDTAVYYCARDANIAALDAFEIWGQGTMVTVSSGGGGSGGGGSGGGGSDIQMTQSPSSLSASVGDRVTITCRASQSISSYLNWYQQKPGKAPKLLIYAASSLQSGVPSRFSGSGSGTDFTLTISSLQPEDFATYYCQQSYSTPLTFGGGTKVEIKSGGGGSEVQLVESGGGLVQPGGSLKLSCAASGFTFNKYAMNWVRQAPGKGLEWVARIRSKYNNYATYYADSVKDRFTISRDDSKNTAYLQMNNLKTEDTAVYYCVRHGNFGNSYISYWAYWGQGTLVTVSSGGGGSGGGGSGGGGSQTVVTQEPSLTVSPGGTVTLTCGSSTGAVTSGNYPNWVQQKPGQAPRGLIGGTKFLAPGTPARFSGSLLGGKAALTLSGVQPEDEAEYYCVLWYSNRWVFGGGTKLTVL

SEQ ID NO: 21 - protein, 5 aa, Artificial Sequence
  Synthetic peptide
SYGMH

SEQ ID NO: 22 - protein, 17 aa, Artificial Sequence
  Synthetic peptide
VISYHGRDTYYARSVKG

SEQ ID NO: 23 - protein, 15 aa, Artificial Sequence
  Synthetic peptide
DGATVTSYYYSGMDV

SEQ ID NO: 24 - protein, 11 aa, Artificial Sequence
  Synthetic peptide
RASQGISNYLA

SEQ ID NO: 25 - protein, 7 aa, Artificial Sequence
  Synthetic peptide
LASSLQS

SEQ ID NO: 26 - protein, 9 aa, Artificial Sequence
  Synthetic peptide
QQYNFYPFT

SEQ ID NO: 27 - protein, 125 aa, Artificial Sequence
  Synthetic peptide
QVQLVESGGGVVQPGRSLRLSCAASGFTFSSYGMHWVRQAPGKGLEWVAVISYHGRDTYYARSVKGRFTISRDNSKNTLYLHMNSLRAEDTAVYYCARDGATVTSYYYSGMDVWGQGTTVTVSSK

SEQ ID NO: 28 - protein, 107 aa, Artificial Sequence
  Synthetic peptide
DIQMTQSPSSLSASVGDRVTITCRASQGISNYLAWFQQKPGKAPKSLIYLASSLQSGVPSKFSGSGSGTDFTLTISSLQPEDFATYYCQQYNFYPFTFGPGTKVDIK

SEQ ID NO: 29 - protein, 246 aa, Artificial Sequence
  Synthetic peptide
QVQLVESGGGVVQPGRSLRLSCAASGFTFSSYGMHWVRQAPGKGLEWVAVISYHGRDTYYARSVKGRFTISRDNSKNTLYLHMNSLRAEDTAVYYCARDGATVTSYYYSGMDVWGQGTTVTVSSGGGGSGGGGSGGGGSDIQMTQSPSSLSASVGDRVTITCRASQGISNYLAWFQQKPGKAPKSLIYLASSLQSGVPSKFSGSGSGTDFTLTISSLQPEDFATYYCQQYNFYPFTFGPGTKVDIK

SEQ ID NO: 30 - protein, 501 aa, Artificial Sequence
  Synthetic peptide
QVQLVESGGGVVQPGRSLRLSCAASGFTFSSYGMHWVRQAPGKGLEWVAVISYHGRDTYYARSVKGRFTISRDNSKNTLYLHMNSLRAEDTAVYYCARDGATVTSYYYSGMDVWGQGTTVTVSSGGGGSGGGGSGGGGSDIQMTQSPSSLSASVGDRVTITCRASQGISNYLAWFQQKPGKAPKSLIYLASSLQSGVPSKFSGSGSGTDFTLTISSLQPEDFATYYCQQYNFYPFTFGPGTKVDIKSGGGGSEVQLVESGGGLVQPGGSLKLSCAASGFTFNKYAMNWVRQAPGKGLEWVARIRSKYNNYATYYADSVKDRFTISRDDSKNTAYLQMNNLKTEDTAVYYCVRHGNFGNSYISYWAYWGQGTLVTVSSGGGGSGGGGSGGGGSQTVVTQEPSLTVSPGGTVTLTCGSSTGAVTSGNYPNWVQQKPGQAPRGLIGGTKFLAPGTPARFSGSLLGGKAALTLSGVQPEDEAEYYCVLWYSNRWVFGGGTKLTVL

SEQ ID NO: 31 - protein, 5 aa, Artificial Sequence
  Synthetic peptide
SYYWS

SEQ ID NO: 32 - protein, 16 aa, Artificial Sequence
  Synthetic peptide
YVYYSGTTNYNPSLKS

SEQ ID NO: 33 - protein, 10 aa, Artificial Sequence
  Synthetic peptide
IAVTGFYFDY

SEQ ID NO: 34 - protein, 12 aa, Artificial Sequence
  Synthetic peptide
RASQRVNNNYLA

SEQ ID NO: 35 - protein, 7 aa, Artificial Sequence
  Synthetic peptide
GASSRAT

SEQ ID NO: 36 - protein, 9 aa, Artificial Sequence
  Synthetic peptide
QQYDRSPLT

SEQ ID NO: 37 - protein, 118 aa, Artificial Sequence
  Synthetic peptide
QVQLQESGPGLVKPSETLSLTCTVSGGSISSYYWSWIRQPPGKGLEWIGYVYYSGTTNYNPSLKSRVTISVDTSKNQFSLKLSSVTAADTAVYYCASIAVTGFYFDYWGQGTLVTVSS

SEQ ID NO: 38 - protein, 108 aa, Artificial Sequence
  Synthetic peptide
EIVLTQSPGTLSLSPGERVTLSCRASQRVNNNYLAWYQQRPGQAPRLLIYGASSRATGIPDRFSGSGSGTDFTLTISRLEPEDFAVYYCQQYDRSPLTFGGGTKLEIK

SEQ ID NO: 39 - protein, 241 aa, Artificial Sequence
  Synthetic peptide
QVQLQESGPGLVKPSETLSLTCTVSGGSISSYYWSWIRQPPGKGLEWIGYVYYSGTTNYNPSLKSRVTISVDTSKNQFSLKLSSVTAADTAVYYCASIAVTGFYFDYWGQGTLVTVSSGGGGSGGGGSGGGGSEIVLTQSPGTLSLSPGERVTLSCRASQRVNNNYLAWYQQRPGQAPRLLIYGASSRATGIPDRFSGSGSGTDFTLTISRLEPEDFAVYYCQQYDRSPLTFGGGTKLEIK

SEQ ID NO: 40 - protein, 496 aa, Artificial Sequence
  Synthetic peptide
QVQLQESGPGLVKPSETLSLTCTVSGGSISSYYWSWIRQPPGKGLEWIGYVYYSGTTNYNPSLKSRVTISVDTSKNQFSLKLSSVTAADTAVYYCASIAVTGFYFDYWGQGTLVTVSSGGGGSGGGGSGGGGSEIVLTQSPGTLSLSPGERVTLSCRASQRVNNNYLAWYQQRPGQAPRLLIYGASSRATGIPDRFSGSGSGTDFTLTISRLEPEDFAVYYCQQYDRSPLTFGGGTKLEIKSGGGGSEVQLVESGGGLVQPGGSLKLSCAASGFTFNKYAMNWVRQAPGKGLEWVARIRSKYNNYATYYADSVKDRFTISRDDSKNTAYLQMNNLKTEDTAVYYCVRHGNFGNSYISYWAYWGQGTLVTVSSGGGGSGGGGSGGGGSQTVVTQEPSLTVSPGGTVTLTCGSSTGAVTSGNYPNWVQQKPGQAPRGLIGGTKFLAPGTPARFSGSLLGGKAALTLSGVQPEDEAEYYCVLWYSNRWVFGGGTKLTVL

SEQ ID NO: 41 - protein, 5 aa, Artificial Sequence
  Synthetic peptide
SYYWS

SEQ ID NO: 42 - protein, 16 aa, Artificial Sequence
  Synthetic peptide
YIYYSGRTNYYPSLKS

SEQ ID NO: 43 - protein, 10 aa, Artificial Sequence
  Synthetic peptide
IAVAGFFFDY

SEQ ID NO: 44 - protein, 12 aa, Artificial Sequence
  Synthetic peptide
RASQSVNKNYLA

SEQ ID NO: 45 - protein, 7 aa, Artificial Sequence
  Synthetic peptide
GASSRAT

SEQ ID NO: 46 - protein, 9 aa, Artificial Sequence
  Synthetic peptide
QQYDRSPLT

SEQ ID NO: 47 - protein, 118 aa, Artificial Sequence
  Synthetic peptide
QVQLQESGPGLVKPSETLSLTCTVSGGSISSYYWSWIRQPPGKGLEWIGYIYYSGRTNYYPSLKSRVTISIDTSKNQFSLKLSSVTAADTAVYYCARIAVAGFFFDYWGQGTLVTVSS

SEQ ID NO: 48 - protein, 108 aa, Artificial Sequence
  Synthetic peptide
EIVLTQSPGTLSLSPGERATLSCRASQSVNKNYLAWYQQKPGQAPRLLIYGASSRATGIPDRFSGSGSGTDFTLTISRLEPEDFAVYYCQQYDRSPLTFGGGTKLEIK

SEQ ID NO: 49 - protein, 241 aa, Artificial Sequence
  Synthetic peptide
QVQLQESGPGLVKPSETLSLTCTVSGGSISSYYWSWIRQPPGKGLEWIGYIYYSGRTNYYPSLKSRVTISIDTSKNQFSLKLSSVTAADTAVYYCARIAVAGFFFDYWGQGTLVTVSSGGGGSGGGGSGGGGSEIVLTQSPGTLSLSPGERATLSCRASQSVNKNYLAWYQQKPGQAPRLLIYGASSRATGIPDRFSGSGSGTDFTLTISRLEPEDFAVYYCQQYDRSPLTFGGGTKLEIK

SEQ ID NO: 50 - protein, 496 aa, Artificial Sequence
  Synthetic peptide
QVQLQESGPGLVKPSETLSLTCTVSGGSISSYYWSWIRQPPGKGLEWIGYIYYSGRTNYYPSLKSRVTISIDTSKNQFSLKLSSVTAADTAVYYCARIAVAGFFFDYWGQGTLVTVSSGGGGSGGGGSGGGGSEIVLTQSPGTLSLSPGERATLSCRASQSVNKNYLAWYQQKPGQAPRLLIYGASSRATGIPDRFSGSGSGTDFTLTISRLEPEDFAVYYCQQYDRSPLTFGGGTKLEIKSGGGGSEVQLVESGGGLVQPGGSLKLSCAASGFTFNKYAMNWVRQAPGKGLEWVARIRSKYNNYATYYADSVKDRFTISRDDSKNTAYLQMNNLKTEDTAVYYCVRHGNFGNSYISYWAYWGQGTLVTVSSGGGGSGGGGSGGGGSQTVVTQEPSLTVSPGGTVTLTCGSSTGAVTSGNYPNWVQQKPGQAPRGLIGGTKFLAPGTPARFSGSLLGGKAALTLSGVQPEDEAEYYCVLWYSNRWVFGGGTKLTVL

SEQ ID NO: 51 - protein, 5 aa, Artificial Sequence
  Synthetic peptide
SFYWS

SEQ ID NO: 52 - protein, 16 aa, Artificial Sequence
  Synthetic peptide
YIYYSGTTNYNPSLKS

SEQ ID NO: 53 - protein, 10 aa, Artificial Sequence
  Synthetic peptide
IAVAGFFFDY

SEQ ID NO: 54 - protein, 12 aa, Artificial Sequence
  Synthetic peptide
RASQSVNKNYLA

SEQ ID NO: 55 - protein, 7 aa, Artificial Sequence
  Synthetic peptide
GASSRAT

SEQ ID NO: 56 - protein, 9 aa, Artificial Sequence
  Synthetic peptide
QQYDRSPLT

SEQ ID NO: 57 - protein, 118 aa, Artificial Sequence
  Synthetic peptide
QVQLQESGPGLVKPSETLSLTCTVSGASISSFYWSWIRQPPGKGLEWIGYIYYSGTTNYNPSLKSRVTISVDTSKNQFSLKLSSVTAADTAVYYCARIAVAGFFFDYWGQGTLVTVSS

SEQ ID NO: 58 - protein, 108 aa, Artificial Sequence
  Synthetic peptide
EIVLTQSPGTLSLSPGERATLSCRASQSVNKNYLAWYQQKPGQAPRLLIYGASSRATGIPDRFSGSGSGTDFTLTISRLEPEDFAVYYCQQYDRSPLTFGGGTKVEIK

SEQ ID NO: 59 - protein, 241 aa, Artificial Sequence
  Synthetic peptide
QVQLQESGPGLVKPSETLSLTCTVSGASISSFYWSWIRQPPGKGLEWIGYIYYSGTTNYNPSLKSRVTISVDTSKNQFSLKLSSVTAADTAVYYCARIAVAGFFFDYWGQGTLVTVSSGGGGSGGGGSGGGGSEIVLTQSPGTLSLSPGERATLSCRASQSVNKNYLAWYQQKPGQAPRLLIYGASSRATGIPDRFSGSGSGTDFTLTISRLEPEDFAVYYCQQYDRSPLTFGGGTKVEIK

SEQ ID NO: 60 - protein, 496 aa, Artificial Sequence
  Synthetic peptide
QVQLQESGPGLVKPSETLSLTCTVSGASISSFYWSWIRQPPGKGLEWIGYIYYSGTTNYNPSLKSRVTISVDTSKNQFSLKLSSVTAADTAVYYCARIAVAGFFFDYWGQGTLVTVSSGGGGSGGGGSGGGGSEIVLTQSPGTLSLSPGERATLSCRASQSVNKNYLAWYQQKPGQAPRLLIYGASSRATGIPDRFSGSGSGTDFTLTISRLEPEDFAVYYCQQYDRSPLTFGGGTKVEIKSGGGGSEVQLVESGGGLVQPGGSLKLSCAASGFTFNKYAMNWVRQAPGKGLEWVARIRSKYNNYATYYADSVKDRFTISRDDSKNTAYLQMNNLKTEDTAVYYCVRHGNFGNSYISYWAYWGQGTLVTVSSGGGGSGGGGSGGGGSQTVVTQEPSLTVSPGGTVTLTCGSSTGAVTSGNYPNWVQQKPGQAPRGLIGGTKFLAPGTPARFSGSLLGGKAALTLSGVQPEDEAEYYCVLWYSNRWVFGGGTKLTVL

SEQ ID NO: 61 - protein, 5 aa, Artificial Sequence
  Synthetic peptide
SFYWS

SEQ ID NO: 62 - protein, 16 aa, Artificial Sequence
  Synthetic peptide
YIYYSGTTNYNPSLKS

SEQ ID NO: 63 - protein, 10 aa, Artificial Sequence
  Synthetic peptide
IAVAGFFFDY

SEQ ID NO: 64 - protein, 12 aa, Artificial Sequence
  Synthetic peptide
RASQSVNKNYLA

SEQ ID NO: 65 - protein, 7 aa, Artificial Sequence
  Synthetic peptide
GASSRAT

SEQ ID NO: 66 - protein, 9 aa, Artificial Sequence
  Synthetic peptide
QQYDRSPLT

SEQ ID NO: 67 - protein, 118 aa, Artificial Sequence
  Synthetic peptide
QVQLQESGPGLVKPSQTLSLTCTVSGASISSFYWSWIRQPPGKGLEWIGYIYYSGTTNYNPSLKSRVTISVDTSKNQFSLKLSSVTAADTAVYYCARIAVAGFFFDYWGQGTLVTVSS

SEQ ID NO: 68 - protein, 108 aa, Artificial Sequence; identical to SEQ ID NO: 58
  Synthetic peptide

SEQ ID NO: 69 - protein, 241 aa, Artificial Sequence
  Synthetic peptide
QVQLQESGPGLVKPSQTLSLTCTVSGASISSFYWSWIRQPPGKGLEWIGYIYYSGTTNYNPSLKSRVTISVDTSKNQFSLKLSSVTAADTAVYYCARIAVAGFFFDYWGQGTLVTVSSGGGGSGGGGSGGGGSEIVLTQSPGTLSLSPGERATLSCRASQSVNKNYLAWYQQKPGQAPRLLIYGASSRATGIPDRFSGSGSGTDFTLTISRLEPEDFAVYYCQQYDRSPLTFGGGTKVEIK

SEQ ID NO: 70 - protein, 496 aa, Artificial Sequence
  Synthetic peptide
QVQLQESGPGLVKPSQTLSLTCTVSGASISSFYWSWIRQPPGKGLEWIGYIYYSGTTNYNPSLKSRVTISVDTSKNQFSLKLSSVTAADTAVYYCARIAVAGFFFDYWGQGTLVTVSSGGGGSGGGGSGGGGSEIVLTQSPGTLSLSPGERATLSCRASQSVNKNYLAWYQQKPGQAPRLLIYGASSRATGIPDRFSGSGSGTDFTLTISRLEPEDFAVYYCQQYDRSPLTFGGGTKVEIKSGGGGSEVQLVESGGGLVQPGGSLKLSCAASGFTFNKYAMNWVRQAPGKGLEWVARIRSKYNNYATYYADSVKDRFTISRDDSKNTAYLQMNNLKTEDTAVYYCVRHGNFGNSYISYWAYWGQGTLVTVSSGGGGSGGGGSGGGGSQTVVTQEPSLTVSPGGTVTLTCGSSTGAVTSGNYPNWVQQKPGQAPRGLIGGTKFLAPGTPARFSGSLLGGKAALTLSGVQPEDEAEYYCVLWYSNRWVFGGGTKLTVL

SEQ ID NO: 71 - protein, 5 aa, Artificial Sequence
  Synthetic peptide
SFYWS

SEQ ID NO: 72 - protein, 16 aa, Artificial Sequence
  Synthetic peptide
YIYYSGTTNYNPSLKS

SEQ ID NO: 73 - protein, 10 aa, Artificial Sequence
  Synthetic peptide
IAVAGFFFDY

SEQ ID NO: 74 - protein, 12 aa, Artificial Sequence
  Synthetic peptide
RASQSVNKNYLA

SEQ ID NO: 75 - protein, 7 aa, Artificial Sequence
  Synthetic peptide
GASSRAT

SEQ ID NO: 76 - protein, 9 aa, Artificial Sequence
  Synthetic peptide
QQYDRSPLT

SEQ ID NO: 77 - protein, 119 aa, Artificial Sequence
  Synthetic peptide
QVQLQEWGPGLVKPSETLSLTCTVSGASISSFYWSWIRQPPGKGLEWIGYIYYSGTTNYNPSLKSRVTISVDTSKNQLSLKLSSVTAADTAVYYCARIAVAGFFFDYWGQGTLVTVSSK

SEQ ID NO: 78 - protein, 108 aa, Artificial Sequence
  Synthetic peptide
EIVLTQSPGTLSLSPGERATLSCRASQSVNKNYLAWYQQKPGQAPRLLIYGASSRATGIPDRFSGSGSGTDFTLTISRLEPEDFAVYYCQQYDRSPLTFGGGTKVDIK

SEQ ID NO: 79 - protein, 241 aa, Artificial Sequence
  Synthetic peptide
QVQLQEWGPGLVKPSETLSLTCTVSGASISSFYWSWIRQPPGKGLEWIGYIYYSGTTNYNPSLKSRVTISVDTSKNQLSLKLSSVTAADTAVYYCARIAVAGFFFDYWGQGTLVTVSSGGGGSGGGGSGGGGSEIVLTQSPGTLSLSPGERATLSCRASQSVNKNYLAWYQQKPGQAPRLLIYGASSRATGIPDRFSGSGSGTDFTLTISRLEPEDFAVYYCQQYDRSPLTFGGGTKVDIK

SEQ ID NO: 80 - protein, 496 aa, Artificial Sequence
  Synthetic peptide
QVQLQEWGPGLVKPSETLSLTCTVSGASISSFYWSWIRQPPGKGLEWIGYIYYSGTTNYNPSLKSRVTISVDTSKNQLSLKLSSVTAADTAVYYCARIAVAGFFFDYWGQGTLVTVSSGGGGSGGGGSGGGGSEIVLTQSPGTLSLSPGERATLSCRASQSVNKNYLAWYQQKPGQAPRLLIYGASSRATGIPDRFSGSGSGTDFTLTISRLEPEDFAVYYCQQYDRSPLTFGGGTKVDIKSGGGGSEVQLVESGGGLVQPGGSLKLSCAASGFTFNKYAMNWVRQAPGKGLEWVARIRSKYNNYATYYADSVKDRFTISRDDSKNTAYLQMNNLKTEDTAVYYCVRHGNFGNSYISYWAYWGQGTLVTVSSGGGGSGGGGSGGGGSQTVVTQEPSLTVSPGGTVTLTCGSSTGAVTSGNYPNWVQQKPGQAPRGLIGGTKFLAPGTPARFSGSLLGGKAALTLSGVQPEDEAEYYCVLWYSNRWVFGGGTKLTVL

SEQ ID NO: 81 - protein, 5 aa, Artificial Sequence
  Synthetic peptide
SFYWS

SEQ ID NO: 82 - protein, 16 aa, Artificial Sequence
  Synthetic peptide
YIYYSGTTNYNPSLKS

SEQ ID NO: 83 - protein, 10 aa, Artificial Sequence
  Synthetic peptide
IAVAGFFFDY

SEQ ID NO: 84 - protein, 12 aa, Artificial Sequence
  Synthetic peptide
RASQSVNKNYLA

SEQ ID NO: 85 - protein, 7 aa, Artificial Sequence
  Synthetic peptide
GASSRAT

SEQ ID NO: 86 - protein, 9 aa, Artificial Sequence
  Synthetic peptide
QQYDRSPLT

SEQ ID NO: 87 - protein, 118 aa, Artificial Sequence; identical to SEQ ID NO: 57
  Synthetic peptide

SEQ ID NO: 88 - protein, 108 aa, Artificial Sequence
  Synthetic peptide
EIVLTQSPGTLSLSPGESATLSCRASQSVNKNYLAWYQQKPGQAPRLLIYGASSRATGIPDRFSGSGSGTDFTLTISRLEPEDFAVYYCQQYDRSPLTFGGGTRLEIK

SEQ ID NO: 89 - protein, 241 aa, Artificial Sequence
  Synthetic peptide
QVQLQESGPGLVKPSETLSLTCTVSGASISSFYWSWIRQPPGKGLEWIGYIYYSGTTNYNPSLKSRVTISVDTSKNQFSLKLSSVTAADTAVYYCARIAVAGFFFDYWGQGTLVTVSSGGGGSGGGGSGGGGSEIVLTQSPGTLSLSPGESATLSCRASQSVNKNYLAWYQQKPGQAPRLLIYGASSRATGIPDRFSGSGSGTDFTLTISRLEPEDFAVYYCQQYDRSPLTFGGGTRLEIK

SEQ ID NO: 90 - protein, 496 aa, Artificial Sequence
  Synthetic peptide
QVQLQESGPGLVKPSETLSLTCTVSGASISSFYWSWIRQPPGKGLEWIGYIYYSGTTNYNPSLKSRVTISVDTSKNQFSLKLSSVTAADTAVYYCARIAVAGFFFDYWGQGTLVTVSSGGGGSGGGGSGGGGSEIVLTQSPGTLSLSPGESATLSCRASQSVNKNYLAWYQQKPGQAPRLLIYGASSRATGIPDRFSGSGSGTDFTLTISRLEPEDFAVYYCQQYDRSPLTFGGGTRLEIKSGGGGSEVQLVESGGGLVQPGGSLKLSCAASGFTFNKYAMNWVRQAPGKGLEWVARIRSKYNNYATYYADSVKDRFTISRDDSKNTAYLQMNNLKTEDTAVYYCVRHGNFGNSYISYWAYWGQGTLVTVSSGGGGSGGGGSGGGGSQTVVTQEPSLTVSPGGTVTLTCGSSTGAVTSGNYPNWVQQKPGQAPRGLIGGTKFLAPGTPARFSGSLLGGKAALTLSGVQPEDEAEYYCVLWYSNRWVFGGGTKLTVL

SEQ ID NO: 91 - protein, 5 aa, Artificial Sequence
  Synthetic peptide
SYYWS

SEQ ID NO: 92 - protein, 16 aa, Artificial Sequence
  Synthetic peptide
YIFYNGITNYNPSLKS

SEQ ID NO: 93 - protein, 10 aa, Artificial Sequence
  Synthetic peptide
IHSGSFSFDY

SEQ ID NO: 94 - protein, 12 aa, Artificial Sequence
  Synthetic peptide
RASQSVSRGYLA

SEQ ID NO: 95 - protein, 7 aa, Artificial Sequence
  Synthetic peptide
GASSRAT

SEQ ID NO: 96 - protein, 9 aa, Artificial Sequence
  Synthetic peptide
QQYDTSPIT

SEQ ID NO: 97 - protein, 118 aa, Artificial Sequence
  Synthetic peptide
QVQLQESGPGLVKPSQTLSLTCTVSGGSISSYYWSWIRQPPGKGLEWIGYIFYNGITNYNPSLKSRVTISLDTSKNQFSLKLSSVTAADTAKYYCARIHSGSFSFDYWDQGTLVTVSS

SEQ ID NO: 98 - protein, 108 aa, Artificial Sequence
  Synthetic peptide
EIVMTQSPGTLSLSPGERATLSCRASQSVSRGYLAWYQQKPGQAPRLLIYGASSRATDIPDRFSGSGSGTDFTLTISRLEPEDFAVYYCQQYDTSPITFGQGTKVEIK

SEQ ID NO: 99 - protein, 241 aa, Artificial Sequence
  Synthetic peptide
QVQLQESGPGLVKPSQTLSLTCTVSGGSISSYYWSWIRQPPGKGLEWIGYIFYNGITNYNPSLKSRVTISLDTSKNQFSLKLSSVTAADTAKYYCARIHSGSFSFDYWDQGTLVTVSSGGGGSGGGGSGGGGSEIVMTQSPGTLSLSPGERATLSCRASQSVSRGYLAWYQQKPGQAPRLLIYGASSRATDIPDRFSGSGSGTDFTLTISRLEPEDFAVYYCQQYDTSPITFGQGTKVEIK

SEQ ID NO: 100 - protein, 496 aa, Artificial Sequence
  Synthetic peptide
QVQLQESGPGLVKPSQTLSLTCTVSGGSISSYYWSWIRQPPGKGLEWIGYIFYNGITNYNPSLKSRVTISLDTSKNQFSLKLSSVTAADTAKYYCARIHSGSFSFDYWDQGTLVTVSSGGGGSGGGGSGGGGSEIVMTQSPGTLSLSPGERATLSCRASQSVSRGYLAWYQQKPGQAPRLLIYGASSRATDIPDRFSGSGSGTDFTLTISRLEPEDFAVYYCQQYDTSPITFGQGTKVEIKSGGGGSEVQLVESGGGLVQPGGSLKLSCAASGFTFNKYAMNWVRQAPGKGLEWVARIRSKYNNYATYYADSVKDRFTISRDDSKNTAYLQMNNLKTEDTAVYYCVRHGNFGNSYISYWAYWGQGTLVTVSSGGGGSGGGGSGGGGSQTVVTQEPSLTVSPGGTVTLTCGSSTGAVTSGNYPNWVQQKPGQAPRGLIGGTKFLAPGTPARFSGSLLGGKAALTLSGVQPEDEAEYYCVLWYSNRWVFGGGTKLTVL

SEQ ID NO: 101 - protein, 5 aa, Artificial Sequence
  Synthetic peptide
NAGMS

SEQ ID NO: 102 - protein, 19 aa, Artificial Sequence
  Synthetic peptide
RIKNKIDGGTTDFAAPVKG

SEQ ID NO: 103 - protein, 10 aa, Artificial Sequence
  Synthetic peptide
RGWYGDYFDY

SEQ ID NO: 104 - protein, 16 aa, Artificial Sequence
  Synthetic peptide
RSSQSLLHSNGYNYLD

SEQ ID NO: 105 - protein, 7 aa, Artificial Sequence
  Synthetic peptide
LGSNRAS

SEQ ID NO: 106 - protein, 9 aa, Artificial Sequence
  Synthetic peptide
MQALQTPFT

SEQ ID NO: 107 - protein, 121 aa, Artificial Sequence
  Synthetic peptide
EVQLVESGGGLVKPGGSLRLSCAASGFIFNNAGMSWVRQAPGKGLEWVGRIKNKIDGGTTDFAAPVKGRFTISRDDSKNTLYLQMNSLKAEDTAVYYCTARGWYGDYFDYWGQGTLVTVSS

SEQ ID NO: 108 - protein, 112 aa, Artificial Sequence
  Synthetic peptide
DIVMTQTPLSLPVTPGEPASISCRSSQSLLHSNGYNYLDWYLQKPGQSPQLLIYLGSNRASGVPDRFSGSGSGTDFTLKISRVEAEDVGIYYCMQALQTPFTFGPGTKVEIK

SEQ ID NO: 109 - protein, 248 aa, Artificial Sequence
  Synthetic peptide
EVQLVESGGGLVKPGGSLRLSCAASGFIFNNAGMSWVRQAPGKGLEWVGRIKNKIDGGTTDFAAPVKGRFTISRDDSKNTLYLQMNSLKAEDTAVYYCTARGWYGDYFDYWGQGTLVTVSSGGGGSGGGGSGGGGSDIVMTQTPLSLPVTPGEPASISCRSSQSLLHSNGYNYLDWYLQKPGQSPQLLIYLGSNRASGVPDRFSGSGSGTDFTLKISRVEAEDVGIYYCMQALQTPFTFGPGTKVEIK

SEQ ID NO: 110 - protein, 503 aa, Artificial Sequence
  Synthetic peptide
EVQLVESGGGLVKPGGSLRLSCAASGFIFNNAGMSWVRQAPGKGLEWVGRIKNKIDGGTTDFAAPVKGRFTISRDDSKNTLYLQMNSLKAEDTAVYYCTARGWYGDYFDYWGQGTLVTVSSGGGGSGGGGSGGGGSDIVMTQTPLSLPVTPGEPASISCRSSQSLLHSNGYNYLDWYLQKPGQSPQLLIYLGSNRASGVPDRFSGSGSGTDFTLKISRVEAEDVGIYYCMQALQTPFTFGPGTKVEIKSGGGGSEVQLVESGGGLVQPGGSLKLSCAASGFTFNKYAMNWVRQAPGKGLEWVARIRSKYNNYATYYADSVKDRFTISRDDSKNTAYLQMNNLKTEDTAVYYCVRHGNFGNSYISYWAYWGQGTLVTVSSGGGGSGGGGSGGGGSQTVVTQEPSLTVSPGGTVTLTCGSSTGAVTSGNYPNWVQQKPGQAPRGLIGGTKFLAPGTPARFSGSLLGGKAALTLSGVQPEDEAEYYCVLWYSNRWVFGGGTKLTVL

SEQ ID NO: 111 - protein, 5 aa, Artificial Sequence
  Synthetic peptide
SYDIH

SEQ ID NO: 112 - protein, 17 aa, Artificial Sequence
  Synthetic peptide
VISSHGSNKNYARSVKG

SEQ ID NO: 113 - protein, 18 aa, Artificial Sequence
  Synthetic peptide
DGYSGNDPFYYYYHGMDV

SEQ ID NO: 114 - protein, 11 aa, Artificial Sequence
  Synthetic peptide
RASQSISSYLN

SEQ ID NO: 115 - protein, 7 aa, Artificial Sequence
  Synthetic peptide
AASSLQS

SEQ ID NO: 116 - protein, 9 aa, Artificial Sequence
  Synthetic peptide
QQSFTTPLT

SEQ ID NO: 117 - protein, 127 aa, Artificial Sequence
  Synthetic peptide
QVQLVESGGGVVQPGRSLRLSCAASGFSFSSYDIHWVRQAPGKGLEWVAVISSHGSNKNYARSVKGRFTISRDNSKNTLYLQMNSLKAEDTAVYYCARDGYSGNDPFYYYYHGMDVWGQGTTVTVSS

SEQ ID NO: 118 - protein, 107 aa, Artificial Sequence
  Synthetic peptide
DIQMTQSPSSLSASVGDRVTITCRASQSISSYLNWYQQKPGKAPKLLIYAASSLQSGVPSRFSGSGSGTDFSLTISSLQPEDFATYYCQQSFTTPLTFGGGTKVEIK

SEQ ID NO: 119 - protein, 249 aa, Artificial Sequence
  Synthetic peptide
QVQLVESGGGVVQPGRSLRLSCAASGFSFSSYDIHWVRQAPGKGLEWVAVISSHGSNKNYARSVKGRFTISRDNSKNTLYLQMNSLKAEDTAVYYCARDGYSGNDPFYYYYHGMDVWGQGTTVTVSSGGGGSGGGGSGGGGSDIQMTQSPSSLSASVGDRVTITCRASQSISSYLNWYQQKPGKAPKLLIYAASSLQSGVPSRFSGSGSGTDFSLTISSLQPEDFATYYCQQSFTTPLTFGGGTKVEIK

SEQ ID NO: 120 - protein, 504 aa, Artificial Sequence
  Synthetic peptide
QVQLVESGGGVVQPGRSLRLSCAASGFSFSSYDIHWVRQAPGKGLEWVAVISSHGSNKNYARSVKGRFTISRDNSKNTLYLQMNSLKAEDTAVYYCARDGYSGNDPFYYYYHGMDVWGQGTTVTVSSGGGGSGGGGSGGGGSDIQMTQSPSSLSASVGDRVTITCRASQSISSYLNWYQQKPGKAPKLLIYAASSLQSGVPSRFSGSGSGTDFSLTISSLQPEDFATYYCQQSFTTPLTFGGGTKVEIKSGGGGSEVQLVESGGGLVQPGGSLKLSCAASGFTFNKYAMNWVRQAPGKGLEWVARIRSKYNNYATYYADSVKDRFTISRDDSKNTAYLQMNNLKTEDTAVYYCVRHGNFGNSYISYWAYWGQGTLVTVSSGGGGSGGGGSGGGGSQTVVTQEPSLTVSPGGTVTLTCGSSTGAVTSGNYPNWVQQKPGQAPRGLIGGTKFLAPGTPARFSGSLLGGKAALTLSGVQPEDEAEYYCVLWYSNRWVFGGGTKLTVL

SEQ ID NO: 121 - protein, 5 aa, Artificial Sequence
  Synthetic peptide
SYYMH

SEQ ID NO: 122 - protein, 17 aa, Artificial Sequence
  Synthetic peptide
IINPSDGSTNYAQNFQG

SEQ ID NO: 123 - protein, 14 aa, Artificial Sequence
  Synthetic peptide
GGNSAFYSYYDMDV

SEQ ID NO: 124 - protein, 16 aa, Artificial Sequence
  Synthetic peptide
RSSQSLVYRDGNTYLS

SEQ ID NO: 125 - protein, 7 aa, Artificial Sequence
  Synthetic peptide
KVSNWQS

SEQ ID NO: 126 - protein, 9 aa, Artificial Sequence
  Synthetic peptide
MQGTHWPPT

SEQ ID NO: 127 - protein, 123 aa, Artificial Sequence
  Synthetic peptide
QVQLVQSGAEVKKPGASVKVSCKASGYTFTSYYMHWVRQAPGQGLEWMGIINPSDGSTNYAQNFQGRVTMTRDTSTNTVYMELSSLRSEDTAVYYCARGGNSAFYSYYDMDVWGQGTTVTVSS

SEQ ID NO: 128 - protein, 112 aa, Artificial Sequence
  Synthetic peptide
DVVMTQSPLSLPVTLGQPASISCRSSQSLVYRDGNTYLSWFQQRPGQSPRRLIYKVSNWQSGVPDRFSGSGSGTDFTLKISRVEAEDVGVYFCMQGTHWPPTFGQGTKVEIK

SEQ ID NO: 129 - protein, 250 aa, Artificial Sequence
  Synthetic peptide
QVQLVQSGAEVKKPGASVKVSCKASGYTFTSYYMHWVRQAPGQGLEWMGIINPSDGSTNYAQNFQGRVTMTRDTSTNTVYMELSSLRSEDTAVYYCARGGNSAFYSYYDMDVWGQGTTVTVSSGGGGSGGGGSGGGGSDVVMTQSPLSLPVTLGQPASISCRSSQSLVYRDGNTYLSWFQQRPGQSPRRLIYKVSNWQSGVPDRFSGSGSGTDFTLKISRVEAEDVGVYFCMQGTHWPPTFGQGTKVEIK

SEQ ID NO: 130 - protein, 505 aa, Artificial Sequence
  Synthetic peptide
QVQLVQSGAEVKKPGASVKVSCKASGYTFTSYYMHWVRQAPGQGLEWMGIINPSDGSTNYAQNFQGRVTMTRDTSTNTVYMELSSLRSEDTAVYYCARGGNSAFYSYYDMDVWGQGTTVTVSSGGGGSGGGGSGGGGSDVVMTQSPLSLPVTLGQPASISCRSSQSLVYRDGNTYLSWFQQRPGQSPRRLIYKVSNWQSGVPDRFSGSGSGTDFTLKISRVEAEDVGVYFCMQGTHWPPTFGQGTKVEIKSGGGGSEVQLVESGGGLVQPGGSLKLSCAASGFTFNKYAMNWVRQAPGKGLEWVARIRSKYNNYATYYADSVKDRFTISRDDSKNTAYLQMNNLKTEDTAVYYCVRHGNFGNSYISYWAYWGQGTLVTVSSGGGGSGGGGSGGGGSQTVVTQEPSLTVSPGGTVTLTCGSSTGAVTSGNYPNWVQQKPGQAPRGLIGGTKFLAPGTPARFSGSLLGGKAALTLSGVQPEDEAEYYCVLWYSNRWVFGGGTKLTVL

SEQ ID NO: 131 - protein, 5 aa, Artificial Sequence
  Synthetic peptide
NYYMH

SEQ ID NO: 132 - protein, 17 aa, Artificial Sequence
  Synthetic peptide
IINPSDGSTSYAQKFQG

SEQ ID NO: 133 - protein, 14 aa, Artificial Sequence
  Synthetic peptide
GGNSAFYSYYDMDV

SEQ ID NO: 134 - protein, 16 aa, Artificial Sequence
  Synthetic peptide
RSSQSLVYRDGNTYLS

SEQ ID NO: 135 - protein, 7 aa, Artificial Sequence
  Synthetic peptide
KVSNWQS

SEQ ID NO: 136 - protein, 9 aa, Artificial Sequence
  Synthetic peptide
MQGTHWPPT

SEQ ID NO: 137 - protein, 123 aa, Artificial Sequence
  Synthetic peptide
QVQLVQSGAEVKKPGASVKVSCKASGYTFTNYYMHWVRQAPGLGLEWMGIINPSDGSTSYAQKFQGRVTMTRDTSTNTVYMDLSSLRSEDTAVYYCARGGNSAFYSYYDMDVWGQGTTVTVSS

SEQ ID NO: 138 - protein, 112 aa, Artificial Sequence
  Synthetic peptide
DVVMTQTPLSLPVTLGQPASISCRSSQSLVYRDGNTYLSWFQQRPGQSPRRLIYKVSNWQSGVPDRFSGGGSGTDFTLKISRVEAEDVGVYYCMQGTHWPPTFGQGTKVEIK

SEQ ID NO: 139 - protein, 250 aa, Artificial Sequence
  Synthetic peptide
QVQLVQSGAEVKKPGASVKVSCKASGYTFTNYYMHWVRQAPGLGLEWMGIINPSDGSTSYAQKFQGRVTMTRDTSTNTVYMDLSSLRSEDTAVYYCARGGNSAFYSYYDMDVWGQGTTVTVSSGGGGSGGGGSGGGGSDVVMTQTPLSLPVTLGQPASISCRSSQSLVYRDGNTYLSWFQQRPGQSPRRLIYKVSNWQSGVPDRFSGGGSGTDFTLKISRVEAEDVGVYYCMQGTHWPPTFGQGTKVEIK

SEQ ID NO: 140 - protein, 505 aa, Artificial Sequence
  Synthetic peptide
QVQLVQSGAEVKKPGASVKVSCKASGYTFTNYYMHWVRQAPGLGLEWMGIINPSDGSTSYAQKFQGRVTMTRDTSTNTVYMDLSSLRSEDTAVYYCARGGNSAFYSYYDMDVWGQGTTVTVSSGGGGSGGGGSGGGGSDVVMTQTPLSLPVTLGQPASISCRSSQSLVYRDGNTYLSWFQQRPGQSPRRLIYKVSNWQSGVPDRFSGGGSGTDFTLKISRVEAEDVGVYYCMQGTHWPPTFGQGTKVEIKSGGGGSEVQLVESGGGLVQPGGSLKLSCAASGFTFNKYAMNWVRQAPGKGLEWVARIRSKYNNYATYYADSVKDRFTISRDDSKNTAYLQMNNLKTEDTAVYYCVRHGNFGNSYISYWAYWGQGTLVTVSSGGGGSGGGGSGGGGSQTVVTQEPSLTVSPGGTVTLTCGSSTGAVTSGNYPNWVQQKPGQAPRGLIGGTKFLAPGTPARFSGSLLGGKAALTLSGVQPEDEAEYYCVLWYSNRWVFGGGTKLTVL

SEQ ID NO: 141 - protein, 5 aa, Artificial Sequence
  Synthetic peptide
GYYIH

SEQ ID NO: 142 - protein, 17 aa, Artificial Sequence
  Synthetic peptide
IINPSDGSTSYGQNFQG

SEQ ID NO: 143 - protein, 14 aa, Artificial Sequence
  Synthetic peptide
GGNSAFYSYYDMDV

SEQ ID NO: 144 - protein, 16 aa, Artificial Sequence
  Synthetic peptide
RSSQSLAYRDGNTYLS

SEQ ID NO: 145 - protein, 7 aa, Artificial Sequence
  Synthetic peptide
KVSNWQS

SEQ ID NO: 146 - protein, 9 aa, Artificial Sequence
  Synthetic peptide
MQGTHWPPT

SEQ ID NO: 147 - protein, 123 aa, Artificial Sequence
  Synthetic peptide
QVQLVQSGAEVKKPGASVKVSCKASGYTFTGYYIHWVRQAPGQGLEWMGIINPSDGSTSYGQNFQGRVTMTRDTSTNTVYMELSSLRSEDTAVYYCARGGNSAFYSYYDMDVWGQGTTVTVSS

SEQ ID NO: 148 - protein, 112 aa, Artificial Sequence
  Synthetic peptide
DVVMTQSPLSLPVTLGQPASISCRSSQSLAYRDGNTYLSWFQQRPGQSPRRLIYKVSNWQSGVPDRFSGSGSGTDFTLKISRVEAEDVGVYFCMQGTHWPPTFGQGTKVEIK

SEQ ID NO: 149 - protein, 250 aa, Artificial Sequence
  Synthetic peptide
QVQLVQSGAEVKKPGASVKVSCKASGYTFTGYYIHWVRQAPGQGLEWMGIINPSDGSTSYGQNFQGRVTMTRDTSTNTVYMELSSLRSEDTAVYYCARGGNSAFYSYYDMDVWGQGTTVTVSSGGGGSGGGGSGGGGSDVVMTQSPLSLPVTLGQPASISCRSSQSLAYRDGNTYLSWFQQRPGQSPRRLIYKVSNWQSGVPDRFSGSGSGTDFTLKISRVEAEDVGVYFCMQGTHWPPTFGQGTKVEIK

SEQ ID NO: 150 - protein, 505 aa, Artificial Sequence
  Synthetic peptide
QVQLVQSGAEVKKPGASVKVSCKASGYTFTGYYIHWVRQAPGQGLEWMGIINPSDGSTSYGQNFQGRVTMTRDTSTNTVYMELSSLRSEDTAVYYCARGGNSAFYSYYDMDVWGQGTTVTVSSGGGGSGGGGSGGGGSDVVMTQSPLSLPVTLGQPASISCRSSQSLAYRDGNTYLSWFQQRPGQSPRRLIYKVSNWQSGVPDRFSGSGSGTDFTLKISRVEAEDVGVYFCMQGTHWPPTFGQGTKVEIKSGGGGSEVQLVESGGGLVQPGGSLKLSCAASGFTFNKYAMNWVRQAPGKGLEWVARIRSKYNNYATYYADSVKDRFTISRDDSKNTAYLQMNNLKTEDTAVYYCVRHGNFGNSYISYWAYWGQGTLVTVSSGGGGSGGGGSGGGGSQTVVTQEPSLTVSPGGTVTLTCGSSTGAVTSGNYPNWVQQKPGQAPRGLIGGTKFLAPGTPARFSGSLLGGKAALTLSGVQPEDEAEYYCVLWYSNRWVFGGGTKLTVL

SEQ ID NO: 151 - protein, 5 aa, Artificial Sequence
  Synthetic peptide
GHYMH

SEQ ID NO: 152 - protein, 17 aa, Artificial Sequence
  Synthetic peptide
IINPSDGSTNYAQKFQG

SEQ ID NO: 153 - protein, 14 aa, Artificial Sequence
  Synthetic peptide
GTTVVHYSYYDMDV

SEQ ID NO: 154 - protein, 16 aa, Artificial Sequence
  Synthetic peptide
RSSQSLVYRDGNTYLT

SEQ ID NO: 155 - protein, 7 aa, Artificial Sequence
  Synthetic peptide
KVSNWQS

SEQ ID NO: 156 - protein, 9 aa, Artificial Sequence
  Synthetic peptide
MQGTHWPPT

SEQ ID NO: 157 - protein, 123 aa, Artificial Sequence
  Synthetic peptide
QVQLVQSGAEVKKPGASVKVSCKASGYTFTGHYMHWVRQAPGQGLEWMGIINPSDGSTNYAQKFQGRVTMTRDTSTSTVYMELRSLRSEDTAVYYCTRGTTVVHYSYYDMDVWGQGTTVTVSS

SEQ ID NO: 158 - protein, 112 aa, Artificial Sequence
  Synthetic peptide
DVVMTQTPLSLPVTLGQPASISCRSSQSLVYRDGNTYLTWFQQRPGQSPRRLIYKVSNWQSGVPDRFSGSGSGTDFTLKISRVEAEDVGVYYCMQGTHWPPTFGGGTKVEIK

SEQ ID NO: 159 - protein, 250 aa, Artificial Sequence
  Synthetic peptide
QVQLVQSGAEVKKPGASVKVSCKASGYTFTGHYMHWVRQAPGQGLEWMGIINPSDGSTNYAQKFQGRVTMTRDTSTSTVYMELRSLRSEDTAVYYCTRGTTVVHYSYYDMDVWGQGTTVTVSSGGGGSGGGGSGGGGSDVVMTQTPLSLPVTLGQPASISCRSSQSLVYRDGNTYLTWFQQRPGQSPRRLIYKVSNWQSGVPDRFSGSGSGTDFTLKISRVEAEDVGVYYCMQGTHWPPTFGGGTKVEIK

SEQ ID NO: 160 - protein, 505 aa, Artificial Sequence
  Synthetic peptide
QVQLVQSGAEVKKPGASVKVSCKASGYTFTGHYMHWVRQAPGQGLEWMGIINPSDGSTNYAQKFQGRVTMTRDTSTSTVYMELRSLRSEDTAVYYCTRGTTVVHYSYYDMDVWGQGTTVTVSSGGGGSGGGGSGGGGSDVVMTQTPLSLPVTLGQPASISCRSSQSLVYRDGNTYLTWFQQRPGQSPRRLIYKVSNWQSGVPDRFSGSGSGTDFTLKISRVEAEDVGVYYCMQGTHWPPTFGGGTKVEIKSGGGGSEVQLVESGGGLVQPGGSLKLSCAASGFTFNKYAMNWVRQAPGKGLEWVARIRSKYNNYATYYADSVKDRFTISRDDSKNTAYLQMNNLKTEDTAVYYCVRHGNFGNSYISYWAYWGQGTLVTVSSGGGGSGGGGSGGGGSQTVVTQEPSLTVSPGGTVTLTCGSSTGAVTSGNYPNWVQQKPGQAPRGLIGGTKFLAPGTPARFSGSLLGGKAALTLSGVQPEDEAEYYCVLWYSNRWVFGGGTKLTVL

SEQ ID NO: 161 - protein, 5 aa, Artificial Sequence
  Synthetic peptide
NYFMH

SEQ ID NO: 162 - protein, 17 aa, Artificial Sequence
  Synthetic peptide
IINPSDGSTSYAQNFQG

SEQ ID NO: 163 - protein, 14 aa, Artificial Sequence
  Synthetic peptide
GGNSAFYSYYDMDV

SEQ ID NO: 164 - protein, 16 aa, Artificial Sequence
  Synthetic peptide
RSSQSLVYRDGNTYLS

SEQ ID NO: 165 - protein, 7 aa, Artificial Sequence
  Synthetic peptide
RVSNWQS

SEQ ID NO: 166 - protein, 9 aa, Artificial Sequence
  Synthetic peptide
MQGTYWPPT

SEQ ID NO: 167 - protein, 123 aa, Artificial Sequence
  Synthetic peptide
QVQLVQSGAEVKKPGASVKVSCKASGYTFTNYFMHWVRQAPGLGLEWMGIINPSDGSTSYAQNFQGRVTMTRDTSTNTVYMELSSLRSEDTAVYYCARGGNSAFYSYYDMDVWGQGTTVTVSS

SEQ ID NO: 168 - protein, 112 aa, Artificial Sequence
  Synthetic peptide
DVVMTQSPLSLPVTLGQPASISCRSSQSLVYRDGNTYLSWFQQRPGQSPRRLIYRVSNWQSGVPDRFSGSGSGTDFTLKISRVEAEDVGVYFCMQGTYWPPTFGQGTKVDIK

SEQ ID NO: 169 - protein, 250 aa, Artificial Sequence
  Synthetic peptide
QVQLVQSGAEVKKPGASVKVSCKASGYTFTNYFMHWVRQAPGLGLEWMGIINPSDGSTSYAQNFQGRVTMTRDTSTNTVYMELSSLRSEDTAVYYCARGGNSAFYSYYDMDVWGQGTTVTVSSGGGGSGGGGSGGGGSDVVMTQSPLSLPVTLGQPASISCRSSQSLVYRDGNTYLSWFQQRPGQSPRRLIYRVSNWQSGVPDRFSGSGSGTDFTLKISRVEAEDVGVYFCMQGTYWPPTFGQGTKVDIK

SEQ ID NO: 170 - protein, 505 aa, Artificial Sequence
  Synthetic peptide
QVQLVQSGAEVKKPGASVKVSCKASGYTFTNYFMHWVRQAPGLGLEWMGIINPSDGSTSYAQNFQGRVTMTRDTSTNTVYMELSSLRSEDTAVYYCARGGNSAFYSYYDMDVWGQGTTVTVSSGGGGSGGGGSGGGGSDVVMTQSPLSLPVTLGQPASISCRSSQSLVYRDGNTYLSWFQQRPGQSPRRLIYRVSNWQSGVPDRFSGSGSGTDFTLKISRVEAEDVGVYFCMQGTYWPPTFGQGTKVDIKSGGGGSEVQLVESGGGLVQPGGSLKLSCAASGFTFNKYAMNWVRQAPGKGLEWVARIRSKYNNYATYYADSVKDRFTISRDDSKNTAYLQMNNLKTEDTAVYYCVRHGNFGNSYISYWAYWGQGTLVTVSSGGGGSGGGGSGGGGSQTVVTQEPSLTVSPGGTVTLTCGSSTGAVTSGNYPNWVQQKPGQAPRGLIGGTKFLAPGTPARFSGSLLGGKAALTLSGVQPEDEAEYYCVLWYSNRWVFGGGTKLTVL

SEQ ID NO: 171 - protein, 5 aa, Artificial Sequence
  Synthetic peptide
NYGMH

SEQ ID NO: 172 - protein, 17 aa, Artificial Sequence
  Synthetic peptide
VISHHGSSKYYARSVKG

SEQ ID NO: 173 - protein, 9 aa, Artificial Sequence
  Synthetic peptide
DWWELVFDY

SEQ ID NO: 174 - protein, 16 aa, Artificial Sequence
  Synthetic peptide
KSSQSLLHSDGKTFLY

SEQ ID NO: 175 - protein, 7 aa, Artificial Sequence
  Synthetic peptide
EVSNRFS

SEQ ID NO: 176 - protein, 9 aa, Artificial Sequence
  Synthetic peptide
LQGIHLPFT

SEQ ID NO: 177 - protein, 118 aa, Artificial Sequence
  Synthetic peptide
QVQLVESGGGAVQPGRSLRLSCAASGFTFSNYGMHWVRQAPGKGLEWVAVISHHGSSKYYARSVKGRFTISRDNSKNTLYLEMNSLRAEDTAVYYCARDWWELVFDYWGQGTLVTVSS

SEQ ID NO: 178 - protein, 112 aa, Artificial Sequence
  Synthetic peptide
DIVMTQTPLSLSVTPGQPASISCKSSQSLLHSDGKTFLYWYLQKPGQPPQLLIYEVSNRFSGVPDRFSGSGSGTDFTLKISRVEAEDVGVYYCLQGIHLPFTFGPGTKVEIK

SEQ ID NO: 179 - protein, 245 aa, Artificial Sequence
  Synthetic peptide
QVQLVESGGGAVQPGRSLRLSCAASGFTFSNYGMHWVRQAPGKGLEWVAVISHHGSSKYYARSVKGRFTISRDNSKNTLYLEMNSLRAEDTAVYYCARDWWELVFDYWGQGTLVTVSSGGGGSGGGGSGGGGSDIVMTQTPLSLSVTPGQPASISCKSSQSLLHSDGKTFLYWYLQKPGQPPQLLIYEVSNRFSGVPDRFSGSGSGTDFTLKISRVEAEDVGVYYCLQGIHLPFTFGPGTKVEIK

SEQ ID NO: 180 - protein, 500 aa, Artificial Sequence
  Synthetic peptide
QVQLVESGGGAVQPGRSLRLSCAASGFTFSNYGMHWVRQAPGKGLEWVAVISHHGSSKYYARSVKGRFTISRDNSKNTLYLEMNSLRAEDTAVYYCARDWWELVFDYWGQGTLVTVSSGGGGSGGGGSGGGGSDIVMTQTPLSLSVTPGQPASISCKSSQSLLHSDGKTFLYWYLQKPGQPPQLLIYEVSNRFSGVPDRFSGSGSGTDFTLKISRVEAEDVGVYYCLQGIHLPFTFGPGTKVEIKSGGGGSEVQLVESGGGLVQPGGSLKLSCAASGFTFNKYAMNWVRQAPGKGLEWVARIRSKYNNYATYYADSVKDRFTISRDDSKNTAYLQMNNLKTEDTAVYYCVRHGNFGNSYISYWAYWGQGTLVTVSSGGGGSGGGGSGGGGSQTVVTQEPSLTVSPGGTVTLTCGSSTGAVTSGNYPNWVQQKPGQAPRGLIGGTKFLAPGTPARFSGSLLGGKAALTLSGVQPEDEAEYYCVLWYSNRWVFGGGTKLTVL

SEQ ID NO: 181 - protein, 7 aa, Artificial Sequence
  Synthetic peptide
NSRMGVS

SEQ ID NO: 182 - protein, 16 aa, Artificial Sequence
  Synthetic peptide
HIFSNDGKSYSTSLKS

SEQ ID NO: 183 - protein, 15 aa, Artificial Sequence
  Synthetic peptide
YNYDSSGYYYSFFDY

SEQ ID NO: 184 - protein, 11 aa, Artificial Sequence
  Synthetic peptide
RASQSISSYLN

SEQ ID NO: 185 - protein, 7 aa, Artificial Sequence
  Synthetic peptide
AASSLQS

SEQ ID NO: 186 - protein, 9 aa, Artificial Sequence
  Synthetic peptide
QQGYSSPFT

SEQ ID NO: 187 - protein, 125 aa, Artificial Sequence
  Synthetic peptide
QVTLKESGPMLVKPTETLTLTCTVSGFSLSNSRMGVSWIRQPPGRALEWLAHIFSNDGKSYSTSLKSRLTISKDTSKSQVVLTMTNMDPVDTATYYCARYNYDSSGYYYSFFDYWGQGTLVTVSS

SEQ ID NO: 188 - protein, 107 aa, Artificial Sequence
  Synthetic peptide
DIQMTQSPSSLSASVGDRVTITCRASQSISSYLNWYQQKPGKAPKLLIYAASSLQSGVPSRFSGSGSGTDFTLTISSLQPEDFATYYCQQGYSSPFTFGGGTKVEIK

SEQ ID NO: 189 - protein, 247 aa, Artificial Sequence
  Synthetic peptide
QVTLKESGPMLVKPTETLTLTCTVSGFSLSNSRMGVSWIRQPPGRALEWLAHIFSNDGKSYSTSLKSRLTISKDTSKSQVVLTMTNMDPVDTATYYCARYNYDSSGYYYSFFDYWGQGTLVTVSSGGGGSGGGGSGGGGSDIQMTQSPSSLSASVGDRVTITCRASQSISSYLNWYQQKPGKAPKLLIYAASSLQSGVPSRFSGSGSGTDFTLTISSLQPEDFATYYCQQGYSSPFTFGGGTKVEIK

SEQ ID NO: 190 - protein, 502 aa, Artificial Sequence
  Synthetic peptide
QVTLKESGPMLVKPTETLTLTCTVSGFSLSNSRMGVSWIRQPPGRALEWLAHIFSNDGKSYSTSLKSRLTISKDTSKSQVVLTMTNMDPVDTATYYCARYNYDSSGYYYSFFDYWGQGTLVTVSSGGGGSGGGGSGGGGSDIQMTQSPSSLSASVGDRVTITCRASQSISSYLNWYQQKPGKAPKLLIYAASSLQSGVPSRFSGSGSGTDFTLTISSLQPEDFATYYCQQGYSSPFTFGGGTKVEIKSGGGGSEVQLVESGGGLVQPGGSLKLSCAASGFTFNKYAMNWVRQAPGKGLEWVARIRSKYNNYATYYADSVKDRFTISRDDSKNTAYLQMNNLKTEDTAVYYCVRHGNFGNSYISYWAYWGQGTLVTVSSGGGGSGGGGSGGGGSQTVVTQEPSLTVSPGGTVTLTCGSSTGAVTSGNYPNWVQQKPGQAPRGLIGGTKFLAPGTPARFSGSLLGGKAALTLSGVQPEDEAEYYCVLWYSNRWVFGGGTKLTVL

SEQ ID NO: 191 - protein, 7 aa, Artificial Sequence
  Synthetic peptide
NARMGVS

SEQ ID NO: 192 - protein, 16 aa, Artificial Sequence
  Synthetic peptide
HIFSTDEKSYSTSLKS

SEQ ID NO: 193 - protein, 15 aa, Artificial Sequence
  Synthetic peptide
YYYDSSGYYYSFFDY

SEQ ID NO: 194 - protein, 11 aa, Artificial Sequence
  Synthetic peptide
RASQSIRSYLN

SEQ ID NO: 195 - protein, 7 aa, Artificial Sequence
  Synthetic peptide
GASNLQS

SEQ ID NO: 196 - protein, 9 aa, Artificial Sequence
  Synthetic peptide
QQSYSSPFT

SEQ ID NO: 197 - protein, 125 aa, Artificial Sequence
  Synthetic peptide
QVTLKESGPVLVKPTETLTLTCTVSGFSLSNARMGVSWLRQPPGKALEWLAHIFSTDEKSYSTSLKSRLTISKDTSKSQVVLTMTNMDPVDTATYYCARYYYDSSGYYYSFFDYWGQGTLVTVSS

SEQ ID NO: 198 - protein, 107 aa, Artificial Sequence
  Synthetic peptide
DIQMTQSPSSLSASVGDRVTITCRASQSIRSYLNWYQQKPGKAPKLLIYGASNLQSGVPSRFSGSGSGTDFTLTISSLQPEDFATYYCQQSYSSPFTFGGGTKVEIK

SEQ ID NO: 199 - protein, 247 aa, Artificial Sequence
  Synthetic peptide
QVTLKESGPVLVKPTETLTLTCTVSGFSLSNARMGVSWLRQPPGKALEWLAHIFSTDEKSYSTSLKSRLTISKDTSKSQVVLTMTNMDPVDTATYYCARYYYDSSGYYYSFFDYWGQGTLVTVSSGGGGSGGGGSGGGGSDIQMTQSPSSLSASVGDRVTITCRASQSIRSYLNWYQQKPGKAPKLLIYGASNLQSGVPSRFSGSGSGTDFTLTISSLQPEDFATYYCQQSYSSPFTFGGGTKVEIK

SEQ ID NO: 200 - protein, 502 aa, Artificial Sequence
  Synthetic peptide
QVTLKESGPVLVKPTETLTLTCTVSGFSLSNARMGVSWLRQPPGKALEWLAHIFSTDEKSYSTSLKSRLTISKDTSKSQVVLTMTNMDPVDTATYYCARYYYDSSGYYYSFFDYWGQGTLVTVSSGGGGSGGGGSGGGGSDIQMTQSPSSLSASVGDRVTITCRASQSIRSYLNWYQQKPGKAPKLLIYGASNLQSGVPSRFSGSGSGTDFTLTISSLQPEDFATYYCQQSYSSPFTFGGGTKVEIKSGGGGSEVQLVESGGGLVQPGGSLKLSCAASGFTFNKYAMNWVRQAPGKGLEWVARIRSKYNNYATYYADSVKDRFTISRDDSKNTAYLQMNNLKTEDTAVYYCVRHGNFGNSYISYWAYWGQGTLVTVSSGGGGSGGGGSGGGGSQTVVTQEPSLTVSPGGTVTLTCGSSTGAVTSGNYPNWVQQKPGQAPRGLIGGTKFLAPGTPARFSGSLLGGKAALTLSGVQPEDEAEYYCVLWYSNRWVFGGGTKLTVL

SEQ ID NO: 201 - protein, 5 aa, Artificial Sequence
  Synthetic peptide
SYYIH

SEQ ID NO: 202 - protein, 17 aa, Artificial Sequence
  Synthetic peptide
IINPSGGSKSYAQKFRG

SEQ ID NO: 203 - protein, 12 aa, Artificial Sequence
  Synthetic peptide
SMSTVTSDAFDI

SEQ ID NO: 204 - protein, 11 aa, Artificial Sequence
  Synthetic peptide
RASQSISNYLN

SEQ ID NO: 205 - protein, 7 aa, Artificial Sequence
  Synthetic peptide
AASSLQS

SEQ ID NO: 206 - protein, 9 aa, Artificial Sequence
  Synthetic peptide
QQSYSAPLT

SEQ ID NO: 207 - protein, 121 aa, Artificial Sequence
  Synthetic peptide
QVQLVQSGAEVKKPGASVKVSCKASGYAFTSYYIHWVRQAPGQGLEWMGIINPSGGSKSYAQKFRGRVTMTRDTSTSTVYMELSSLTSEDTAVYYCARSMSTVTSDAFDIWGQGTMVTVSS

SEQ ID NO: 208 - protein, 107 aa, Artificial Sequence
  Synthetic peptide
DIQMTQSPSSLSASVGDRVTITCRASQSISNYLNWYQQKPGKAPKLLIYAASSLQSGVPSRFSGSGSGTEFTLTISSLQPEDFATYYCQQSYSAPLTFGGGTKVDIK

SEQ ID NO: 209 - protein, 243 aa, Artificial Sequence
  Synthetic peptide
QVQLVQSGAEVKKPGASVKVSCKASGYAFTSYYIHWVRQAPGQGLEWMGIINPSGGSKSYAQKFRGRVTMTRDTSTSTVYMELSSLTSEDTAVYYCARSMSTVTSDAFDIWGQGTMVTVSSGGGGSGGGGSGGGGSDIQMTQSPSSLSASVGDRVTITCRASQSISNYLNWYQQKPGKAPKLLIYAASSLQSGVPSRFSGSGSGTEFTLTISSLQPEDFATYYCQQSYSAPLTFGGGTKVDIK

SEQ ID NO: 210 - protein, 498 aa, Artificial Sequence
  Synthetic peptide
QVQLVQSGAEVKKPGASVKVSCKASGYAFTSYYIHWVRQAPGQGLEWMGIINPSGGSKSYAQKFRGRVTMTRDTSTSTVYMELSSLTSEDTAVYYCARSMSTVTSDAFDIWGQGTMVTVSSGGGGSGGGGSGGGGSDIQMTQSPSSLSASVGDRVTITCRASQSISNYLNWYQQKPGKAPKLLIYAASSLQSGVPSRFSGSGSGTEFTLTISSLQPEDFATYYCQQSYSAPLTFGGGTKVDIKSGGGGSEVQLVESGGGLVQPGGSLKLSCAASGFTFNKYAMNWVRQAPGKGLEWVARIRSKYNNYATYYADSVKDRFTISRDDSKNTAYLQMNNLKTEDTAVYYCVRHGNFGNSYISYWAYWGQGTLVTVSSGGGGSGGGGSGGGGSQTVVTQEPSLTVSPGGTVTLTCGSSTGAVTSGNYPNWVQQKPGQAPRGLIGGTKFLAPGTPARFSGSLLGGKAALTLSGVQPEDEAEYYCVLWYSNRWVFGGGTKLTVL

SEQ ID NO: 211 - protein, 496 aa, Artificial Sequence
  Synthetic peptide
QVQLQESGPGLVKPSETLSLTCTVSGGSISSYYWSWIRQPPGKGLEWIGYVYYSGTTNYNPSLKSRVTISVDTSKNQFSLKLSSVTAADTAVYYCASIAVTGFYFDYWGQGTLVTVSSGGGGSGGGGSGGGGSEIVLTQSPGTLSLSPGERVTLSCRASQRVNNNYLAWYQQRPGQAPRLLIYGASSRATGIPDRFSGSGSGTDFTLTISRLEPEDFAVYYCQQYDRSPLTFGGGTKLEIKSGGGGSEVQLVESGGGLVQPGGSLRLSCAASGFTFNSYAMNWVRQAPGKGLEWVARIRSKYNNYATYYADSVKGRFTISRDDSKNTAYLQMNSLKTEDTAVYYCVRHGNFGNSYVSWWAYWGQGTLVTVSSGGGGSGGGGSGGGGSQTVVTQEPSLTVSPGGTVTLTCGSSTGAVTSGNYPNWVQQKPGQAPRGLIGGTKFLAPGTPARFSGSLLGGKAALTLSGVQPEDEAEYYCVLWYSNRWVFGGGTKLTVL

SEQ ID NO: 212 - protein, 496 aa, Artificial Sequence
  Synthetic peptide
QVQLQESGPGLVKPSETLSLTCTVSGGSISSYYWSWIRQPPGKGLEWIGYIYYSGRTNYYPSLKSRVTISIDTSKNQFSLKLSSVTAADTAVYYCARIAVAGFFFDYWGQGTLVTVSSGGGGSGGGGSGGGGSEIVLTQSPGTLSLSPGERATLSCRASQSVNKNYLAWYQQKPGQAPRLLIYGASSRATGIPDRFSGSGSGTDFTLTISRLEPEDFAVYYCQQYDRSPLTFGGGTKLEIKSGGGGSEVQLVESGGGLVQPGGSLRLSCAASGFTFNSYAMNWVRQAPGKGLEWVARIRSKYNNYATYYADSVKGRFTISRDDSKNTAYLQMNSLKTEDTAVYYCVRHGNFGNSYVSWWAYWGQGTLVTVSSGGGGSGGGGSGGGGSQTVVTQEPSLTVSPGGTVTLTCGSSTGAVTSGNYPNWVQQKPGQAPRGLIGGTKFLAPGTPARFSGSLLGGKAALTLSGVQPEDEAEYYCVLWYSNRWVFGGGTKLTVL

SEQ ID NO: 213 - protein, 496 aa, Artificial Sequence
  Synthetic peptide
QVQLQESGPGLVKPSETLSLTCTVSGASISSFYWSWIRQPPGKGLEWIGYIYYSGTTNYNPSLKSRVTISVDTSKNQFSLKLSSVTAADTAVYYCARIAVAGFFFDYWGQGTLVTVSSGGGGSGGGGSGGGGSEIVLTQSPGTLSLSPGERATLSCRASQSVNKNYLAWYQQKPGQAPRLLIYGASSRATGIPDRFSGSGSGTDFTLTISRLEPEDFAVYYCQQYDRSPLTFGGGTKVEIKSGGGGSEVQLVESGGGLVQPGGSLRLSCAASGFTFNSYAMNWVRQAPGKGLEWVARIRSKYNNYATYYADSVKGRFTISRDDSKNTAYLQMNSLKTEDTAVYYCVRHGNFGNSYVSWWAYWGQGTLVTVSSGGGGSGGGGSGGGGSQTVVTQEPSLTVSPGGTVTLTCGSSTGAVTSGNYPNWVQQKPGQAPRGLIGGTKFLAPGTPARFSGSLLGGKAALTLSGVQPEDEAEYYCVLWYSNRWVFGGGTKLTVL

SEQ ID NO: 214 - protein, 496 aa, Artificial Sequence
  Synthetic peptide
QVQLQESGPGLVKPSQTLSLTCTVSGASISSFYWSWIRQPPGKGLEWIGYIYYSGTTNYNPSLKSRVTISVDTSKNQFSLKLSSVTAADTAVYYCARIAVAGFFFDYWGQGTLVTVSSGGGGSGGGGSGGGGSEIVLTQSPGTLSLSPGERATLSCRASQSVNKNYLAWYQQKPGQAPRLLIYGASSRATGIPDRFSGSGSGTDFTLTISRLEPEDFAVYYCQQYDRSPLTFGGGTKVEIKSGGGGSEVQLVESGGGLVQPGGSLRLSCAASGFTFNSYAMNWVRQAPGKGLEWVARIRSKYNNYATYYADSVKGRFTISRDDSKNTAYLQMNSLKTEDTAVYYCVRHGNFGNSYVSWWAYWGQGTLVTVSSGGGGSGGGGSGGGGSQTVVTQEPSLTVSPGGTVTLTCGSSTGAVTSGNYPNWVQQKPGQAPRGLIGGTKFLAPGTPARFSGSLLGGKAALTLSGVQPEDEAEYYCVLWYSNRWVFGGGTKLTVL

SEQ ID NO: 215 - protein, 496 aa, Artificial Sequence
  Synthetic peptide
QVQLQEWGPGLVKPSETLSLTCTVSGASISSFYWSWIRQPPGKGLEWIGYIYYSGTTNYNPSLKSRVTISVDTSKNQLSLKLSSVTAADTAVYYCARIAVAGFFFDYWGQGTLVTVSSGGGGSGGGGSGGGGSEIVLTQSPGTLSLSPGERATLSCRASQSVNKNYLAWYQQKPGQAPRLLIYGASSRATGIPDRFSGSGSGTDFTLTISRLEPEDFAVYYCQQYDRSPLTFGGGTKVDIKSGGGGSEVQLVESGGGLVQPGGSLRLSCAASGFTFNSYAMNWVRQAPGKGLEWVARIRSKYNNYATYYADSVKGRFTISRDDSKNTAYLQMNSLKTEDTAVYYCVRHGNFGNSYVSWWAYWGQGTLVTVSSGGGGSGGGGSGGGGSQTVVTQEPSLTVSPGGTVTLTCGSSTGAVTSGNYPNWVQQKPGQAPRGLIGGTKFLAPGTPARFSGSLLGGKAALTLSGVQPEDEAEYYCVLWYSNRWVFGGGTKLTVL

SEQ ID NO: 216 - protein, 496 aa, Artificial Sequence
  Synthetic peptide
QVQLQESGPGLVKPSETLSLTCTVSGASISSFYWSWIRQPPGKGLEWIGYIYYSGTTNYNPSLKSRVTISVDTSKNQFSLKLSSVTAADTAVYYCARIAVAGFFFDYWGQGTLVTVSSGGGGSGGGGSGGGGSEIVLTQSPGTLSLSPGESATLSCRASQSVNKNYLAWYQQKPGQAPRLLIYGASSRATGIPDRFSGSGSGTDFTLTISRLEPEDFAVYYCQQYDRSPLTFGGGTRLEIKSGGGGSEVQLVESGGGLVQPGGSLRLSCAASGFTFNSYAMNWVRQAPGKGLEWVARIRSKYNNYATYYADSVKGRFTISRDDSKNTAYLQMNSLKTEDTAVYYCVRHGNFGNSYVSWWAYWGQGTLVTVSSGGGGSGGGGSGGGGSQTVVTQEPSLTVSPGGTVTLTCGSSTGAVTSGNYPNWVQQKPGQAPRGLIGGTKFLAPGTPARFSGSLLGGKAALTLSGVQPEDEAEYYCVLWYSNRWVFGGGTKLTVL

SEQ ID NO: 217 - protein, 496 aa, Artificial Sequence
  Synthetic peptide
QVQLQESGPGLVKPSQTLSLTCTVSGGSISSYYWSWIRQPPGKGLEWIGYIFYNGITNYNPSLKSRVTISLDTSKNQFSLKLSSVTAADTAKYYCARIHSGSFSFDYWDQGTLVTVSSGGGGSGGGGSGGGGSEIVMTQSPGTLSLSPGERATLSCRASQSVSRGYLAWYQQKPGQAPRLLIYGASSRATDIPDRFSGSGSGTDFTLTISRLEPEDFAVYYCQQYDTSPITFGQGTKVEIKSGGGGSEVQLVESGGGLVQPGGSLRLSCAASGFTFNSYAMNWVRQAPGKGLEWVARIRSKYNNYATYYADSVKGRFTISRDDSKNTAYLQMNSLKTEDTAVYYCVRHGNFGNSYVSWWAYWGQGTLVTVSSGGGGSGGGGSGGGGSQTVVTQEPSLTVSPGGTVTLTCGSSTGAVTSGNYPNWVQQKPGQAPRGLIGGTKFLAPGTPARFSGSLLGGKAALTLSGVQPEDEAEYYCVLWYSNRWVFGGGTKLTVL

SEQ ID NO: 218 - protein, 505 aa, Artificial Sequence
  Synthetic peptide
QVQLVQSGAEVKKPGASVKVSCKASGYTFTSYYMHWVRQAPGQGLEWMGIINPSDGSTNYAQNFQGRVTMTRDTSTNTVYMELSSLRSEDTAVYYCARGGNSAFYSYYDMDVWGQGTTVTVSSGGGGSGGGGSGGGGSDVVMTQSPLSLPVTLGQPASISCRSSQSLVYRDGNTYLSWFQQRPGQSPRRLIYKVSNWQSGVPDRFSGSGSGTDFTLKISRVEAEDVGVYFCMQGTHWPPTFGQGTKVEIKSGGGGSEVQLVESGGGLVQPGGSLRLSCAASGFTFNSYAMNWVRQAPGKGLEWVARIRSKYNNYATYYADSVKGRFTISRDDSKNTAYLQMNSLKTEDTAVYYCVRHGNFGNSYVSWWAYWGQGTLVTVSSGGGGSGGGGSGGGGSQTVVTQEPSLTVSPGGTVTLTCGSSTGAVTSGNYPNWVQQKPGQAPRGLIGGTKFLAPGTPARFSGSLLGGKAALTLSGVQPEDEAEYYCVLWYSNRWVFGGGTKLTVL

SEQ ID NO: 219 - protein, 505 aa, Artificial Sequence
  Synthetic peptide
QVQLVQSGAEVKKPGASVKVSCKASGYTFTNYYMHWVRQAPGLGLEWMGIINPSDGSTSYAQKFQGRVTMTRDTSTNTVYMDLSSLRSEDTAVYYCARGGNSAFYSYYDMDVWGQGTTVTVSSGGGGSGGGGSGGGGSDVVMTQTPLSLPVTLGQPASISCRSSQSLVYRDGNTYLSWFQQRPGQSPRRLIYKVSNWQSGVPDRFSGGGSGTDFTLKISRVEAEDVGVYYCMQGTHWPPTFGQGTKVEIKSGGGGSEVQLVESGGGLVQPGGSLRLSCAASGFTFNSYAMNWVRQAPGKGLEWVARIRSKYNNYATYYADSVKGRFTISRDDSKNTAYLQMNSLKTEDTAVYYCVRHGNFGNSYVSWWAYWGQGTLVTVSSGGGGSGGGGSGGGGSQTVVTQEPSLTVSPGGTVTLTCGSSTGAVTSGNYPNWVQQKPGQAPRGLIGGTKFLAPGTPARFSGSLLGGKAALTLSGVQPEDEAEYYCVLWYSNRWVFGGGTKLTVL

SEQ ID NO: 220 - protein, 505 aa, Artificial Sequence
  Synthetic peptide
QVQLVQSGAEVKKPGASVKVSCKASGYTFTGYYIHWVRQAPGQGLEWMGIINPSDGSTSYGQNFQGRVTMTRDTSTNTVYMELSSLRSEDTAVYYCARGGNSAFYSYYDMDVWGQGTTVTVSSGGGGSGGGGSGGGGSDVVMTQSPLSLPVTLGQPASISCRSSQSLAYRDGNTYLSWFQQRPGQSPRRLIYKVSNWQSGVPDRFSGSGSGTDFTLKISRVEAEDVGVYFCMQGTHWPPTFGQGTKVEIKSGGGGSEVQLVESGGGLVQPGGSLRLSCAASGFTFNSYAMNWVRQAPGKGLEWVARIRSKYNNYATYYADSVKGRFTISRDDSKNTAYLQMNSLKTEDTAVYYCVRHGNFGNSYVSWWAYWGQGTLVTVSSGGGGSGGGGSGGGGSQTVVTQEPSLTVSPGGTVTLTCGSSTGAVTSGNYPNWVQQKPGQAPRGLIGGTKFLAPGTPARFSGSLLGGKAALTLSGVQPEDEAEYYCVLWYSNRWVFGGGTKLTVL

SEQ ID NO: 221 - protein, 1096 aa, Artificial Sequence
  Synthetic peptide
QVQLVESGGGVVQSGRSLRLSCAASGFTFSDYGIHWVRQAPGKGLEWVAVISYHGSNKYYARSVKGRFTVSRDNSKNTLYLQMNSLRAEDTAVYYCAREIPFGMDVWGQGTTVTVSSGGGGSGGGGSGGGGSDIVMTQTPLSLPVTPGEPASISCRSSQSLLHSDGYNYLDWYLQKPGQSPQLLIYLGSNRASGVPDRFSGSGSGTDFTLTISRVEAEDVGVYYCMQALQTPLTFGGGTKVDIKSGGGGSEVQLVESGGGLVQPGGSLKLSCAASGFTFNKYAMNWVRQAPGKGLEWVARIRSKYNNYATYYADSVKDRFTISRDDSKNTAYLQMNNLKTEDTAVYYCVRHGNFGNSYISYWAYWGQGTLVTVSSGGGGSGGGGSGGGGSQTVVTQEPSLTVSPGGTVTLTCGSSTGAVTSGNYPNWVQQKPGQAPRGLIGGTKFLAPGTPARFSGSLLGGKAALTLSGVQPEDEAEYYCVLWYSNRWVFGGGTKLTVLPGGGGSDAHKSEVAHRFKDLGEENFKALVLIAFAQYLQQCPFEDHVKLVNEVTEFAKTCVADESAENCDKSLHTLFGDKLCTVATLRETYGEMADCCAKQEPERNECFLQHKDDNPNLPRLVRPEVDVMCTAFHDNEETFLKKYLYEIARRHPYFYAPELLFFAKRYKAAFTECCQAADKAACLLPKLDELRDEGKASSAKQRLKCASLQKFGERAFKAWAVARLSQRFPKAEFAEVSKLVTDLTKVHTECCHGDLLECADDRADLAKYICENQDSISSKLKECCEKPLLEKSHCIAEVENDEMPADLPSLAADFVESKDVCKNYAEAKDVFLGMFLYEYARRHPDYSVVLLLRLAKTYETTLEKCCAAADPHECYAKVFDEFKPLVEEPQNLIKQNCELFEQLGEYKFQNALLVRYTKKVPQVSTPTLVEVSRNLGKVGSKCCKHPEAKRMPCAEDYLSVVLNQLCVLHEKTPVSDRVTKCCTESLVNRRPCFSALEVDETYVPKEFNAGTFTFHADICTLSEKERQIKKQTALVELVKHKPKATKEQLKAAMDDFAAFVEKCCKADDKETCFAEEGKKLVAASQAALGLHHHHHH

SEQ ID NO: 222 - protein, 1095 aa, Artificial Sequence
  Synthetic peptide
QVQLVQSGAEVKKPGASVKVSCKASGYTFTGYYMHWVRQAPGQGLEWMGWINPNSGDTNYAQKFQGRVTMTRDTSISTAYMELSRLTSDDTAVYYCARDANIAALDAFEIWGQGTMVTVSSGGGGSGGGGSGGGGSDIQMTQSPSSLSASVGDRVTITCRASQSISSYLNWYQQKPGKAPKLLIYAASSLQSGVPSRFSGSGSGTDFTLTISSLQPEDFATYYCQQSYSTPLTFGGGTKVEIKSGGGGSEVQLVESGGGLVQPGGSLKLSCAASGFTFNKYAMNWVRQAPGKGLEWVARIRSKYNNYATYYADSVKDRFTISRDDSKNTAYLQMNNLKTEDTAVYYCVRHGNFGNSYISYWAYWGQGTLVTVSSGGGGSGGGGSGGGGSQTVVTQEPSLTVSPGGTVTLTCGSSTGAVTSGNYPNWVQQKPGQAPRGLIGGTKFLAPGTPARFSGSLLGGKAALTLSGVQPEDEAEYYCVLWYSNRWVFGGGTKLTVLPGGGGSDAHKSEVAHRFKDLGEENFKALVLIAFAQYLQQCPFEDHVKLVNEVTEFAKTCVADESAENCDKSLHTLFGDKLCTVATLRETYGEMADCCAKQEPERNECFLQHKDDNPNLPRLVRPEVDVMCTAFHDNEETFLKKYLYEIARRHPYFYAPELLFFAKRYKAAFTECCQAADKAACLLPKLDELRDEGKASSAKQRLKCASLQKFGERAFKAWAVARLSQRFPKAEFAEVSKLVTDLTKVHTECCHGDLLECADDRADLAKYICENQDSISSKLKECCEKPLLEKSHCIAEVENDEMPADLPSLAADFVESKDVCKNYAEAKDVFLGMFLYEYARRHPDYSVVLLLRLAKTYETTLEKCCAAADPHECYAKVFDEFKPLVEEPQNLIKQNCELFEQLGEYKFQNALLVRYTKKVPQVSTPTLVEVSRNLGKVGSKCCKHPEAKRMPCAEDYLSVVLNQLCVLHEKTPVSDRVTKCCTESLVNRRPCFSALEVDETYVPKEFNAGTFTFHADICTLSEKERQIKKQTALVELVKHKPKATKEQLKAAMDDFAAFVEKCCKADDKETCFAEEGKKLVAASQAALGLHHHHHH

SEQ ID NO: 223 - protein, 1098 aa, Artificial Sequence
  Synthetic peptide
QVQLVESGGGVVQPGRSLRLSCAASGFTFSSYGMHWVRQAPGKGLEWVAVISYHGRDTYYARSVKGRFTISRDNSKNTLYLHMNSLRAEDTAVYYCARDGATVTSYYYSGMDVWGQGTTVTVSSGGGGSGGGGSGGGGSDIQMTQSPSSLSASVGDRVTITCRASQGISNYLAWFQQKPGKAPKSLIYLASSLQSGVPSKFSGSGSGTDFTLTISSLQPEDFATYYCQQYNFYPFTFGPGTKVDIKSGGGGSEVQLVESGGGLVQPGGSLKLSCAASGFTFNKYAMNWVRQAPGKGLEWVARIRSKYNNYATYYADSVKDRFTISRDDSKNTAYLQMNNLKTEDTAVYYCVRHGNFGNSYISYWAYWGQGTLVTVSSGGGGSGGGGSGGGGSQTVVTQEPSLTVSPGGTVTLTCGSSTGAVTSGNYPNWVQQKPGQAPRGLIGGTKFLAPGTPARFSGSLLGGKAALTLSGVQPEDEAEYYCVLWYSNRWVFGGGTKLTVLPGGGGSDAHKSEVAHRFKDLGEENFKALVLIAFAQYLQQCPFEDHVKLVNEVTEFAKTCVADESAENCDKSLHTLFGDKLCTVATLRETYGEMADCCAKQEPERNECFLQHKDDNPNLPRLVRPEVDVMCTAFHDNEETFLKKYLYEIARRHPYFYAPELLFFAKRYKAAFTECCQAADKAACLLPKLDELRDEGKASSAKQRLKCASLQKFGERAFKAWAVARLSQRFPKAEFAEVSKLVTDLTKVHTECCHGDLLECADDRADLAKYICENQDSISSKLKECCEKPLLEKSHCIAEVENDEMPADLPSLAADFVESKDVCKNYAEAKDVFLGMFLYEYARRHPDYSVVLLLRLAKTYETTLEKCCAAADPHECYAKVFDEFKPLVEEPQNLIKQNCELFEQLGEYKFQNALLVRYTKKVPQVSTPTLVEVSRNLGKVGSKCCKHPEAKRMPCAEDYLSVVLNQLCVLHEKTPVSDRVTKCCTESLVNRRPCFSALEVDETYVPKEFNAETFTFHADICTLSEKERQIKKQTALVELVKHKPKATKEQLKAVMDDFAAFVEKCCKADDKETCFAEEGKKLVAASQAALGLHHHHHH

SEQ ID NO: 224 - protein, 1093 aa, Artificial Sequence
  Synthetic peptide
QVQLQESGPGLVKPSETLSLTCTVSGGSISSYYWSWIRQPPGKGLEWIGYVYYSGTTNYNPSLKSRVTISVDTSKNQFSLKLSSVTAADTAVYYCASIAVTGFYFDYWGQGTLVTVSSGGGGSGGGGSGGGGSEIVLTQSPGTLSLSPGERVTLSCRASQRVNNNYLAWYQQRPGQAPRLLIYGASSRATGIPDRFSGSGSGTDFTLTISRLEPEDFAVYYCQQYDRSPLTFGGGTKLEIKSGGGGSEVQLVESGGGLVQPGGSLKLSCAASGFTFNKYAMNWVRQAPGKGLEWVARIRSKYNNYATYYADSVKDRFTISRDDSKNTAYLQMNNLKTEDTAVYYCVRHGNFGNSYISYWAYWGQGTLVTVSSGGGGSGGGGSGGGGSQTVVTQEPSLTVSPGGTVTLTCGSSTGAVTSGNYPNWVQQKPGQAPRGLIGGTKFLAPGTPARFSGSLLGGKAALTLSGVQPEDEAEYYCVLWYSNRWVFGGGTKLTVLPGGGGSDAHKSEVAHRFKDLGEENFKALVLIAFAQYLQQCPFEDHVKLVNEVTEFAKTCVADESAENCDKSLHTLFGDKLCTVATLRETYGEMADCCAKQEPERNECFLQHKDDNPNLPRLVRPEVDVMCTAFHDNEETFLKKYLYEIARRHPYFYAPELLFFAKRYKAAFTECCQAADKAACLLPKLDELRDEGKASSAKQRLKCASLQKFGERAFKAWAVARLSQRFPKAEFAEVSKLVTDLTKVHTECCHGDLLECADDRADLAKYICENQDSISSKLKECCEKPLLEKSHCIAEVENDEMPADLPSLAADFVESKDVCKNYAEAKDVFLGMFLYEYARRHPDYSVVLLLRLAKTYETTLEKCCAAADPHECYAKVFDEFKPLVEEPQNLIKQNCELFEQLGEYKFQNALLVRYTKKVPQVSTPTLVEVSRNLGKVGSKCCKHPEAKRMPCAEDYLSVVLNQLCVLHEKTPVSDRVTKCCTESLVNRRPCFSALEVDETYVPKEFNAETFTFHADICTLSEKERQIKKQTALVELVKHKPKATKEQLKAVMDDFAAFVEKCCKADDKETCFAEEGKKLVAASQAALGLHHHHHH

SEQ ID NO: 225 - protein, 1093 aa, Artificial Sequence
  Synthetic peptide
QVQLQESGPGLVKPSETLSLTCTVSGGSISSYYWSWIRQPPGKGLEWIGYIYYSGRTNYYPSLKSRVTISIDTSKNQFSLKLSSVTAADTAVYYCARIAVAGFFFDYWGQGTLVTVSSGGGGSGGGGSGGGGSEIVLTQSPGTLSLSPGERATLSCRASQSVNKNYLAWYQQKPGQAPRLLIYGASSRATGIPDRFSGSGSGTDFTLTISRLEPEDFAVYYCQQYDRSPLTFGGGTKLEIKSGGGGSEVQLVESGGGLVQPGGSLKLSCAASGFTFNKYAMNWVRQAPGKGLEWVARIRSKYNNYATYYADSVKDRFTISRDDSKNTAYLQMNNLKTEDTAVYYCVRHGNFGNSYISYWAYWGQGTLVTVSSGGGGSGGGGSGGGGSQTVVTQEPSLTVSPGGTVTLTCGSSTGAVTSGNYPNWVQQKPGQAPRGLIGGTKFLAPGTPARFSGSLLGGKAALTLSGVQPEDEAEYYCVLWYSNRWVFGGGTKLTVLPGGGGSDAHKSEVAHRFKDLGEENFKALVLIAFAQYLQQCPFEDHVKLVNEVTEFAKTCVADESAENCDKSLHTLFGDKLCTVATLRETYGEMADCCAKQEPERNECFLQHKDDNPNLPRLVRPEVDVMCTAFHDNEETFLKKYLYEIARRHPYFYAPELLFFAKRYKAAFTECCQAADKAACLLPKLDELRDEGKASSAKQRLKCASLQKFGERAFKAWAVARLSQRFPKAEFAEVSKLVTDLTKVHTECCHGDLLECADDRADLAKYICENQDSISSKLKECCEKPLLEKSHCIAEVENDEMPADLPSLAADFVESKDVCKNYAEAKDVFLGMFLYEYARRHPDYSVVLLLRLAKTYETTLEKCCAAADPHECYAKVFDEFKPLVEEPQNLIKQNCELFEQLGEYKFQNALLVRYTKKVPQVSTPTLVEVSRNLGKVGSKCCKHPEAKRMPCAEDYLSVVLNQLCVLHEKTPVSDRVTKCCTESLVNRRPCFSALEVDETYVPKEFNAETFTFHADICTLSEKERQIKKQTALVELVKHKPKATKEQLKAVMDDFAAFVEKCCKADDKETCFAEEGKKLVAASQAALGLHHHHHH

SEQ ID NO: 226 - protein, 1093 aa, Artificial Sequence
  Synthetic peptide
QVQLQESGPGLVKPSETLSLTCTVSGASISSFYWSWIRQPPGKGLEWIGYIYYSGTTNYNPSLKSRVTISVDTSKNQFSLKLSSVTAADTAVYYCARIAVAGFFFDYWGQGTLVTVSSGGGGSGGGGSGGGGSEIVLTQSPGTLSLSPGERATLSCRASQSVNKNYLAWYQQKPGQAPRLLIYGASSRATGIPDRFSGSGSGTDFTLTISRLEPEDFAVYYCQQYDRSPLTFGGGTKVEIKSGGGGSEVQLVESGGGLVQPGGSLKLSCAASGFTFNKYAMNWVRQAPGKGLEWVARIRSKYNNYATYYADSVKDRFTISRDDSKNTAYLQMNNLKTEDTAVYYCVRHGNFGNSYISYWAYWGQGTLVTVSSGGGGSGGGGSGGGGSQTVVTQEPSLTVSPGGTVTLTCGSSTGAVTSGNYPNWVQQKPGQAPRGLIGGTKFLAPGTPARFSGSLLGGKAALTLSGVQPEDEAEYYCVLWYSNRWVFGGGTKLTVLPGGGGSDAHKSEVAHRFKDLGEENFKALVLIAFAQYLQQCPFEDHVKLVNEVTEFAKTCVADESAENCDKSLHTLFGDKLCTVATLRETYGEMADCCAKQEPERNECFLQHKDDNPNLPRLVRPEVDVMCTAFHDNEETFLKKYLYEIARRHPYFYAPELLFFAKRYKAAFTECCQAADKAACLLPKLDELRDEGKASSAKQRLKCASLQKFGERAFKAWAVARLSQRFPKAEFAEVSKLVTDLTKVHTECCHGDLLECADDRADLAKYICENQDSISSKLKECCEKPLLEKSHCIAEVENDEMPADLPSLAADFVESKDVCKNYAEAKDVFLGMFLYEYARRHPDYSVVLLLRLAKTYETTLEKCCAAADPHECYAKVFDEFKPLVEEPQNLIKQNCELFEQLGEYKFQNALLVRYTKKVPQVSTPTLVEVSRNLGKVGSKCCKHPEAKRMPCAEDYLSVVLNQLCVLHEKTPVSDRVTKCCTESLVNRRPCFSALEVDETYVPKEFNAETFTFHADICTLSEKERQIKKQTALVELVKHKPKATKEQLKAVMDDFAAFVEKCCKADDKETCFAEEGKKLVAASQAALGLHHHHHH

SEQ ID NO: 227 - protein, 1093 aa, Artificial Sequence
  Synthetic peptide
QVQLQESGPGLVKPSQTLSLTCTVSGASISSFYWSWIRQPPGKGLEWIGYIYYSGTTNYNPSLKSRVTISVDTSKNQFSLKLSSVTAADTAVYYCARIAVAGFFFDYWGQGTLVTVSSGGGGSGGGGSGGGGSEIVLTQSPGTLSLSPGERATLSCRASQSVNKNYLAWYQQKPGQAPRLLIYGASSRATGIPDRFSGSGSGTDFTLTISRLEPEDFAVYYCQQYDRSPLTFGGGTKVEIKSGGGGSEVQLVESGGGLVQPGGSLKLSCAASGFTFNKYAMNWVRQAPGKGLEWVARIRSKYNNYATYYADSVKDRFTISRDDSKNTAYLQMNNLKTEDTAVYYCVRHGNFGNSYISYWAYWGQGTLVTVSSGGGGSGGGGSGGGGSQTVVTQEPSLTVSPGGTVTLTCGSSTGAVTSGNYPNWVQQKPGQAPRGLIGGTKFLAPGTPARFSGSLLGGKAALTLSGVQPEDEAEYYCVLWYSNRWVFGGGTKLTVLPGGGGSDAHKSEVAHRFKDLGEENFKALVLIAFAQYLQQCPFEDHVKLVNEVTEFAKTCVADESAENCDKSLHTLFGDKLCTVATLRETYGEMADCCAKQEPERNECFLQHKDDNPNLPRLVRPEVDVMCTAFHDNEETFLKKYLYEIARRHPYFYAPELLFFAKRYKAAFTECCQAADKAACLLPKLDELRDEGKASSAKQRLKCASLQKFGERAFKAWAVARLSQRFPKAEFAEVSKLVTDLTKVHTECCHGDLLECADDRADLAKYICENQDSISSKLKECCEKPLLEKSHCIAEVENDEMPADLPSLAADFVESKDVCKNYAEAKDVFLGMFLYEYARRHPDYSVVLLLRLAKTYETTLEKCCAAADPHECYAKVFDEFKPLVEEPQNLIKQNCELFEQLGEYKFQNALLVRYTKKVPQVSTPTLVEVSRNLGKVGSKCCKHPEAKRMPCAEDYLSVVLNQLCVLHEKTPVSDRVTKCCTESLVNRRPCFSALEVDETYVPKEFNAETFTFHADICTLSEKERQIKKQTALVELVKHKPKATKEQLKAVMDDFAAFVEKCCKADDKETCFAEEGKKLVAASQAALGLHHHHHH

SEQ ID NO: 228 - protein, 1093 aa, Artificial Sequence
  Synthetic peptide
QVQLQEWGPGLVKPSETLSLTCTVSGASISSFYWSWIRQPPGKGLEWIGYIYYSGTTNYNPSLKSRVTISVDTSKNQLSLKLSSVTAADTAVYYCARIAVAGFFFDYWGQGTLVTVSSGGGGSGGGGSGGGGSEIVLTQSPGTLSLSPGERATLSCRASQSVNKNYLAWYQQKPGQAPRLLIYGASSRATGIPDRFSGSGSGTDFTLTISRLEPEDFAVYYCQQYDRSPLTFGGGTKVDIKSGGGGSEVQLVESGGGLVQPGGSLKLSCAASGFTFNKYAMNWVRQAPGKGLEWVARIRSKYNNYATYYADSVKDRFTISRDDSKNTAYLQMNNLKTEDTAVYYCVRHGNFGNSYISYWAYWGQGTLVTVSSGGGGSGGGGSGGGGSQTVVTQEPSLTVSPGGTVTLTCGSSTGAVTSGNYPNWVQQKPGQAPRGLIGGTKFLAPGTPARFSGSLLGGKAALTLSGVQPEDEAEYYCVLWYSNRWVFGGGTKLTVLPGGGGSDAHKSEVAHRFKDLGEENFKALVLIAFAQYLQQCPFEDHVKLVNEVTEFAKTCVADESAENCDKSLHTLFGDKLCTVATLRETYGEMADCCAKQEPERNECFLQHKDDNPNLPRLVRPEVDVMCTAFHDNEETFLKKYLYEIARRHPYFYAPELLFFAKRYKAAFTECCQAADKAACLLPKLDELRDEGKASSAKQRLKCASLQKFGERAFKAWAVARLSQRFPKAEFAEVSKLVTDLTKVHTECCHGDLLECADDRADLAKYICENQDSISSKLKECCEKPLLEKSHCIAEVENDEMPADLPSLAADFVESKDVCKNYAEAKDVFLGMFLYEYARRHPDYSVVLLLRLAKTYETTLEKCCAAADPHECYAKVFDEFKPLVEEPQNLIKQNCELFEQLGEYKFQNALLVRYTKKVPQVSTPTLVEVSRNLGKVGSKCCKHPEAKRMPCAEDYLSVVLNQLCVLHEKTPVSDRVTKCCTESLVNRRPCFSALEVDETYVPKEFNAETFTFHADICTLSEKERQIKKQTALVELVKHKPKATKEQLKAVMDDFAAFVEKCCKADDKETCFAEEGKKLVAASQAALGLHHHHHH

SEQ ID NO: 229 - protein, 1093 aa, Artificial Sequence
  Synthetic peptide
QVQLQESGPGLVKPSETLSLTCTVSGASISSFYWSWIRQPPGKGLEWIGYIYYSGTTNYNPSLKSRVTISVDTSKNQFSLKLSSVTAADTAVYYCARIAVAGFFFDYWGQGTLVTVSSGGGGSGGGGSGGGGSEIVLTQSPGTLSLSPGESATLSCRASQSVNKNYLAWYQQKPGQAPRLLIYGASSRATGIPDRFSGSGSGTDFTLTISRLEPEDFAVYYCQQYDRSPLTFGGGTRLEIKSGGGGSEVQLVESGGGLVQPGGSLKLSCAASGFTFNKYAMNWVRQAPGKGLEWVARIRSKYNNYATYYADSVKDRFTISRDDSKNTAYLQMNNLKTEDTAVYYCVRHGNFGNSYISYWAYWGQGTLVTVSSGGGGSGGGGSGGGGSQTVVTQEPSLTVSPGGTVTLTCGSSTGAVTSGNYPNWVQQKPGQAPRGLIGGTKFLAPGTPARFSGSLLGGKAALTLSGVQPEDEAEYYCVLWYSNRWVFGGGTKLTVLPGGGGSDAHKSEVAHRFKDLGEENFKALVLIAFAQYLQQCPFEDHVKLVNEVTEFAKTCVADESAENCDKSLHTLFGDKLCTVATLRETYGEMADCCAKQEPERNECFLQHKDDNPNLPRLVRPEVDVMCTAFHDNEETFLKKYLYEIARRHPYFYAPELLFFAKRYKAAFTECCQAADKAACLLPKLDELRDEGKASSAKQRLKCASLQKFGERAFKAWAVARLSQRFPKAEFAEVSKLVTDLTKVHTECCHGDLLECADDRADLAKYICENQDSISSKLKECCEKPLLEKSHCIAEVENDEMPADLPSLAADFVESKDVCKNYAEAKDVFLGMFLYEYARRHPDYSVVLLLRLAKTYETTLEKCCAAADPHECYAKVFDEFKPLVEEPQNLIKQNCELFEQLGEYKFQNALLVRYTKKVPQVSTPTLVEVSRNLGKVGSKCCKHPEAKRMPCAEDYLSVVLNQLCVLHEKTPVSDRVTKCCTESLVNRRPCFSALEVDETYVPKEFNAETFTFHADICTLSEKERQIKKQTALVELVKHKPKATKEQLKAVMDDFAAFVEKCCKADDKETCFAEEGKKLVAASQAALGLHHHHHH

SEQ ID NO: 230 - protein, 1093 aa, Artificial Sequence
  Synthetic peptide
QVQLQESGPGLVKPSQTLSLTCTVSGGSISSYYWSWIRQPPGKGLEWIGYIFYNGITNYNPSLKSRVTISLDTSKNQFSLKLSSVTAADTAKYYCARIHSGSFSFDYWDQGTLVTVSSGGGGSGGGGSGGGGSEIVMTQSPGTLSLSPGERATLSCRASQSVSRGYLAWYQQKPGQAPRLLIYGASSRATDIPDRFSGSGSGTDFTLTISRLEPEDFAVYYCQQYDTSPITFGQGTKVEIKSGGGGSEVQLVESGGGLVQPGGSLKLSCAASGFTFNKYAMNWVRQAPGKGLEWVARIRSKYNNYATYYADSVKDRFTISRDDSKNTAYLQMNNLKTEDTAVYYCVRHGNFGNSYISYWAYWGQGTLVTVSSGGGGSGGGGSGGGGSQTVVTQEPSLTVSPGGTVTLTCGSSTGAVTSGNYPNWVQQKPGQAPRGLIGGTKFLAPGTPARFSGSLLGGKAALTLSGVQPEDEAEYYCVLWYSNRWVFGGGTKLTVLPGGGGSDAHKSEVAHRFKDLGEENFKALVLIAFAQYLQQCPFEDHVKLVNEVTEFAKTCVADESAENCDKSLHTLFGDKLCTVATLRETYGEMADCCAKQEPERNECFLQHKDDNPNLPRLVRPEVDVMCTAFHDNEETFLKKYLYEIARRHPYFYAPELLFFAKRYKAAFTECCQAADKAACLLPKLDELRDEGKASSAKQRLKCASLQKFGERAFKAWAVARLSQRFPKAEFAEVSKLVTDLTKVHTECCHGDLLECADDRADLAKYICENQDSISSKLKECCEKPLLEKSHCIAEVENDEMPADLPSLAADFVESKDVCKNYAEAKDVFLGMFLYEYARRHPDYSVVLLLRLAKTYETTLEKCCAAADPHECYAKVFDEFKPLVEEPQNLIKQNCELFEQLGEYKFQNALLVRYTKKVPQVSTPTLVEVSRNLGKVGSKCCKHPEAKRMPCAEDYLSVVLNQLCVLHEKTPVSDRVTKCCTESLVNRRPCFSALEVDETYVPKEFNAETFTFHADICTLSEKERQIKKQTALVELVKHKPKATKEQLKAVMDDFAAFVEKCCKADDKETCFAEEGKKLVAASQAALGLHHHHHH

SEQ ID NO: 231 - protein, 1100 aa, Artificial Sequence
  Synthetic peptide
EVQLVESGGGLVKPGGSLRLSCAASGFIFNNAGMSWVRQAPGKGLEWVGRIKNKIDGGTTDFAAPVKGRFTISRDDSKNTLYLQMNSLKAEDTAVYYCTARGWYGDYFDYWGQGTLVTVSSGGGGSGGGGSGGGGSDIVMTQTPLSLPVTPGEPASISCRSSQSLLHSNGYNYLDWYLQKPGQSPQLLIYLGSNRASGVPDRFSGSGSGTDFTLKISRVEAEDVGIYYCMQALQTPFTFGPGTKVEIKSGGGGSEVQLVESGGGLVQPGGSLKLSCAASGFTFNKYAMNWVRQAPGKGLEWVARIRSKYNNYATYYADSVKDRFTISRDDSKNTAYLQMNNLKTEDTAVYYCVRHGNFGNSYISYWAYWGQGTLVTVSSGGGGSGGGGSGGGGSQTVVTQEPSLTVSPGGTVTLTCGSSTGAVTSGNYPNWVQQKPGQAPRGLIGGTKFLAPGTPARFSGSLLGGKAALTLSGVQPEDEAEYYCVLWYSNRWVFGGGTKLTVLPGGGGSDAHKSEVAHRFKDLGEENFKALVLIAFAQYLQQCPFEDHVKLVNEVTEFAKTCVADESAENCDKSLHTLFGDKLCTVATLRETYGEMADCCAKQEPERNECFLQHKDDNPNLPRLVRPEVDVMCTAFHDNEETFLKKYLYEIARRHPYFYAPELLFFAKRYKAAFTECCQAADKAACLLPKLDELRDEGKASSAKQRLKCASLQKFGERAFKAWAVARLSQRFPKAEFAEVSKLVTDLTKVHTECCHGDLLECADDRADLAKYICENQDSISSKLKECCEKPLLEKSHCIAEVENDEMPADLPSLAADFVESKDVCKNYAEAKDVFLGMFLYEYARRHPDYSVVLLLRLAKTYETTLEKCCAAADPHECYAKVFDEFKPLVEEPQNLIKQNCELFEQLGEYKFQNALLVRYTKKVPQVSTPTLVEVSRNLGKVGSKCCKHPEAKRMPCAEDYLSVVLNQLCVLHEKTPVSDRVTKCCTESLVNRRPCFSALEVDETYVPKEFNAETFTFHADICTLSEKERQIKKQTALVELVKHKPKATKEQLKAVMDDFAAFVEKCCKADDKETCFAEEGKKLVAASQAALGLHHHHHH

SEQ ID NO: 232 - protein, 1101 aa, Artificial Sequence
  Synthetic peptide
QVQLVESGGGVVQPGRSLRLSCAASGFSFSSYDIHWVRQAPGKGLEWVAVISSHGSNKNYARSVKGRFTISRDNSKNTLYLQMNSLKAEDTAVYYCARDGYSGNDPFYYYYHGMDVWGQGTTVTVSSGGGGSGGGGSGGGGSDIQMTQSPSSLSASVGDRVTITCRASQSISSYLNWYQQKPGKAPKLLIYAASSLQSGVPSRFSGSGSGTDFSLTISSLQPEDFATYYCQQSFTTPLTFGGGTKVEIKSGGGGSEVQLVESGGGLVQPGGSLKLSCAASGFTFNKYAMNWVRQAPGKGLEWVARIRSKYNNYATYYADSVKDRFTISRDDSKNTAYLQMNNLKTEDTAVYYCVRHGNFGNSYISYWAYWGQGTLVTVSSGGGGSGGGGSGGGGSQTVVTQEPSLTVSPGGTVTLTCGSSTGAVTSGNYPNWVQQKPGQAPRGLIGGTKFLAPGTPARFSGSLLGGKAALTLSGVQPEDEAEYYCVLWYSNRWVFGGGTKLTVLPGGGGSDAHKSEVAHRFKDLGEENFKALVLIAFAQYLQQCPFEDHVKLVNEVTEFAKTCVADESAENCDKSLHTLFGDKLCTVATLRETYGEMADCCAKQEPERNECFLQHKDDNPNLPRLVRPEVDVMCTAFHDNEETFLKKYLYEIARRHPYFYAPELLFFAKRYKAAFTECCQAADKAACLLPKLDELRDEGKASSAKQRLKCASLQKFGERAFKAWAVARLSQRFPKAEFAEVSKLVTDLTKVHTECCHGDLLECADDRADLAKYICENQDSISSKLKECCEKPLLEKSHCIAEVENDEMPADLPSLAADFVESKDVCKNYAEAKDVFLGMFLYEYARRHPDYSVVLLLRLAKTYETTLEKCCAAADPHECYAKVFDEFKPLVEEPQNLIKQNCELFEQLGEYKFQNALLVRYTKKVPQVSTPTLVEVSRNLGKVGSKCCKHPEAKRMPCAEDYLSVVLNQLCVLHEKTPVSDRVTKCCTESLVNRRPCFSALEVDETYVPKEFNAETFTFHADICTLSEKERQIKKQTALVELVKHKPKATKEQLKAVMDDFAAFVEKCCKADDKETCFAEEGKKLVAASQAALGLHHHHHH

SEQ ID NO: 233 - protein, 1102 aa, Artificial Sequence
  Synthetic peptide
QVQLVQSGAEVKKPGASVKVSCKASGYTFTSYYMHWVRQAPGQGLEWMGIINPSDGSTNYAQNFQGRVTMTRDTSTNTVYMELSSLRSEDTAVYYCARGGNSAFYSYYDMDVWGQGTTVTVSSGGGGSGGGGSGGGGSDVVMTQSPLSLPVTLGQPASISCRSSQSLVYRDGNTYLSWFQQRPGQSPRRLIYKVSNWQSGVPDRFSGSGSGTDFTLKISRVEAEDVGVYFCMQGTHWPPTFGQGTKVEIKSGGGGSEVQLVESGGGLVQPGGSLKLSCAASGFTFNKYAMNWVRQAPGKGLEWVARIRSKYNNYATYYADSVKDRFTISRDDSKNTAYLQMNNLKTEDTAVYYCVRHGNFGNSYISYWAYWGQGTLVTVSSGGGGSGGGGSGGGGSQTVVTQEPSLTVSPGGTVTLTCGSSTGAVTSGNYPNWVQQKPGQAPRGLIGGTKFLAPGTPARFSGSLLGGKAALTLSGVQPEDEAEYYCVLWYSNRWVFGGGTKLTVLPGGGGSDAHKSEVAHRFKDLGEENFKALVLIAFAQYLQQCPFEDHVKLVNEVTEFAKTCVADESAENCDKSLHTLFGDKLCTVATLRETYGEMADCCAKQEPERNECFLQHKDDNPNLPRLVRPEVDVMCTAFHDNEETFLKKYLYEIARRHPYFYAPELLFFAKRYKAAFTECCQAADKAACLLPKLDELRDEGKASSAKQRLKCASLQKFGERAFKAWAVARLSQRFPKAEFAEVSKLVTDLTKVHTECCHGDLLECADDRADLAKYICENQDSISSKLKECCEKPLLEKSHCIAEVENDEMPADLPSLAADFVESKDVCKNYAEAKDVFLGMFLYEYARRHPDYSVVLLLRLAKTYETTLEKCCAAADPHECYAKVFDEFKPLVEEPQNLIKQNCELFEQLGEYKFQNALLVRYTKKVPQVSTPTLVEVSRNLGKVGSKCCKHPEAKRMPCAEDYLSVVLNQLCVLHEKTPVSDRVTKCCTESLVNRRPCFSALEVDETYVPKEFNAETFTFHADICTLSEKERQIKKQTALVELVKHKPKATKEQLKAVMDDFAAFVEKCCKADDKETCFAEEGKKLVAASQAALGLHHHHHH

SEQ ID NO: 234 - protein, 1102 aa, Artificial Sequence
  Synthetic peptide
QVQLVQSGAEVKKPGASVKVSCKASGYTFTNYYMHWVRQAPGLGLEWMGIINPSDGSTSYAQKFQGRVTMTRDTSTNTVYMDLSSLRSEDTAVYYCARGGNSAFYSYYDMDVWGQGTTVTVSSGGGGSGGGGSGGGGSDVVMTQTPLSLPVTLGQPASISCRSSQSLVYRDGNTYLSWFQQRPGQSPRRLIYKVSNWQSGVPDRFSGGGSGTDFTLKISRVEAEDVGVYYCMQGTHWPPTFGQGTKVEIKSGGGGSEVQLVESGGGLVQPGGSLKLSCAASGFTFNKYAMNWVRQAPGKGLEWVARIRSKYNNYATYYADSVKDRFTISRDDSKNTAYLQMNNLKTEDTAVYYCVRHGNFGNSYISYWAYWGQGTLVTVSSGGGGSGGGGSGGGGSQTVVTQEPSLTVSPGGTVTLTCGSSTGAVTSGNYPNWVQQKPGQAPRGLIGGTKFLAPGTPARFSGSLLGGKAALTLSGVQPEDEAEYYCVLWYSNRWVFGGGTKLTVLPGGGGSDAHKSEVAHRFKDLGEENFKALVLIAFAQYLQQCPFEDHVKLVNEVTEFAKTCVADESAENCDKSLHTLFGDKLCTVATLRETYGEMADCCAKQEPERNECFLQHKDDNPNLPRLVRPEVDVMCTAFHDNEETFLKKYLYEIARRHPYFYAPELLFFAKRYKAAFTECCQAADKAACLLPKLDELRDEGKASSAKQRLKCASLQKFGERAFKAWAVARLSQRFPKAEFAEVSKLVTDLTKVHTECCHGDLLECADDRADLAKYICENQDSISSKLKECCEKPLLEKSHCIAEVENDEMPADLPSLAADFVESKDVCKNYAEAKDVFLGMFLYEYARRHPDYSVVLLLRLAKTYETTLEKCCAAADPHECYAKVFDEFKPLVEEPQNLIKQNCELFEQLGEYKFQNALLVRYTKKVPQVSTPTLVEVSRNLGKVGSKCCKHPEAKRMPCAEDYLSVVLNQLCVLHEKTPVSDRVTKCCTESLVNRRPCFSALEVDETYVPKEFNAETFTFHADICTLSEKERQIKKQTALVELVKHKPKATKEQLKAVMDDFAAFVEKCCKADDKETCFAEEGKKLVAASQAALGLHHHHHH

SEQ ID NO: 235 - protein, 1102 aa, Artificial Sequence
  Synthetic peptide
QVQLVQSGAEVKKPGASVKVSCKASGYTFTGYYIHWVRQAPGQGLEWMGIINPSDGSTSYGQNFQGRVTMTRDTSTNTVYMELSSLRSEDTAVYYCARGGNSAFYSYYDMDVWGQGTTVTVSSGGGGSGGGGSGGGGSDVVMTQSPLSLPVTLGQPASISCRSSQSLAYRDGNTYLSWFQQRPGQSPRRLIYKVSNWQSGVPDRFSGSGSGTDFTLKISRVEAEDVGVYFCMQGTHWPPTFGQGTKVEIKSGGGGSEVQLVESGGGLVQPGGSLKLSCAASGFTFNKYAMNWVRQAPGKGLEWVARIRSKYNNYATYYADSVKDRFTISRDDSKNTAYLQMNNLKTEDTAVYYCVRHGNFGNSYISYWAYWGQGTLVTVSSGGGGSGGGGSGGGGSQTVVTQEPSLTVSPGGTVTLTCGSSTGAVTSGNYPNWVQQKPGQAPRGLIGGTKFLAPGTPARFSGSLLGGKAALTLSGVQPEDEAEYYCVLWYSNRWVFGGGTKLTVLPGGGGSDAHKSEVAHRFKDLGEENFKALVLIAFAQYLQQCPFEDHVKLVNEVTEFAKTCVADESAENCDKSLHTLFGDKLCTVATLRETYGEMADCCAKQEPERNECFLQHKDDNPNLPRLVRPEVDVMCTAFHDNEETFLKKYLYEIARRHPYFYAPELLFFAKRYKAAFTECCQAADKAACLLPKLDELRDEGKASSAKQRLKCASLQKFGERAFKAWAVARLSQRFPKAEFAEVSKLVTDLTKVHTECCHGDLLECADDRADLAKYICENQDSISSKLKECCEKPLLEKSHCIAEVENDEMPADLPSLAADFVESKDVCKNYAEAKDVFLGMFLYEYARRHPDYSVVLLLRLAKTYETTLEKCCAAADPHECYAKVFDEFKPLVEEPQNLIKQNCELFEQLGEYKFQNALLVRYTKKVPQVSTPTLVEVSRNLGKVGSKCCKHPEAKRMPCAEDYLSVVLNQLCVLHEKTPVSDRVTKCCTESLVNRRPCFSALEVDETYVPKEFNAETFTFHADICTLSEKERQIKKQTALVELVKHKPKATKEQLKAVMDDFAAFVEKCCKADDKETCFAEEGKKLVAASQAALGLHHHHHH

SEQ ID NO: 236 - protein, 1102 aa, Artificial Sequence
  Synthetic peptide
QVQLVQSGAEVKKPGASVKVSCKASGYTFTGHYMHWVRQAPGQGLEWMGIINPSDGSTNYAQKFQGRVTMTRDTSTSTVYMELRSLRSEDTAVYYCTRGTTVVHYSYYDMDVWGQGTTVTVSSGGGGSGGGGSGGGGSDVVMTQTPLSLPVTLGQPASISCRSSQSLVYRDGNTYLTWFQQRPGQSPRRLIYKVSNWQSGVPDRFSGSGSGTDFTLKISRVEAEDVGVYYCMQGTHWPPTFGGGTKVEIKSGGGGSEVQLVESGGGLVQPGGSLKLSCAASGFTFNKYAMNWVRQAPGKGLEWVARIRSKYNNYATYYADSVKDRFTISRDDSKNTAYLQMNNLKTEDTAVYYCVRHGNFGNSYISYWAYWGQGTLVTVSSGGGGSGGGGSGGGGSQTVVTQEPSLTVSPGGTVTLTCGSSTGAVTSGNYPNWVQQKPGQAPRGLIGGTKFLAPGTPARFSGSLLGGKAALTLSGVQPEDEAEYYCVLWYSNRWVFGGGTKLTVLPGGGGSDAHKSEVAHRFKDLGEENFKALVLIAFAQYLQQCPFEDHVKLVNEVTEFAKTCVADESAENCDKSLHTLFGDKLCTVATLRETYGEMADCCAKQEPERNECFLQHKDDNPNLPRLVRPEVDVMCTAFHDNEETFLKKYLYEIARRHPYFYAPELLFFAKRYKAAFTECCQAADKAACLLPKLDELRDEGKASSAKQRLKCASLQKFGERAFKAWAVARLSQRFPKAEFAEVSKLVTDLTKVHTECCHGDLLECADDRADLAKYICENQDSISSKLKECCEKPLLEKSHCIAEVENDEMPADLPSLAADFVESKDVCKNYAEAKDVFLGMFLYEYARRHPDYSVVLLLRLAKTYETTLEKCCAAADPHECYAKVFDEFKPLVEEPQNLIKQNCELFEQLGEYKFQNALLVRYTKKVPQVSTPTLVEVSRNLGKVGSKCCKHPEAKRMPCAEDYLSVVLNQLCVLHEKTPVSDRVTKCCTESLVNRRPCFSALEVDETYVPKEFNAETFTFHADICTLSEKERQIKKQTALVELVKHKPKATKEQLKAVMDDFAAFVEKCCKADDKETCFAEEGKKLVAASQAALGLHHHHHH

SEQ ID NO: 237 - protein, 1102 aa, Artificial Sequence
  Synthetic peptide
QVQLVQSGAEVKKPGASVKVSCKASGYTFTNYFMHWVRQAPGLGLEWMGIINPSDGSTSYAQNFQGRVTMTRDTSTNTVYMELSSLRSEDTAVYYCARGGNSAFYSYYDMDVWGQGTTVTVSSGGGGSGGGGSGGGGSDVVMTQSPLSLPVTLGQPASISCRSSQSLVYRDGNTYLSWFQQRPGQSPRRLIYRVSNWQSGVPDRFSGSGSGTDFTLKISRVEAEDVGVYFCMQGTYWPPTFGQGTKVDIKSGGGGSEVQLVESGGGLVQPGGSLKLSCAASGFTFNKYAMNWVRQAPGKGLEWVARIRSKYNNYATYYADSVKDRFTISRDDSKNTAYLQMNNLKTEDTAVYYCVRHGNFGNSYISYWAYWGQGTLVTVSSGGGGSGGGGSGGGGSQTVVTQEPSLTVSPGGTVTLTCGSSTGAVTSGNYPNWVQQKPGQAPRGLIGGTKFLAPGTPARFSGSLLGGKAALTLSGVQPEDEAEYYCVLWYSNRWVFGGGTKLTVLPGGGGSDAHKSEVAHRFKDLGEENFKALVLIAFAQYLQQCPFEDHVKLVNEVTEFAKTCVADESAENCDKSLHTLFGDKLCTVATLRETYGEMADCCAKQEPERNECFLQHKDDNPNLPRLVRPEVDVMCTAFHDNEETFLKKYLYEIARRHPYFYAPELLFFAKRYKAAFTECCQAADKAACLLPKLDELRDEGKASSAKQRLKCASLQKFGERAFKAWAVARLSQRFPKAEFAEVSKLVTDLTKVHTECCHGDLLECADDRADLAKYICENQDSISSKLKECCEKPLLEKSHCIAEVENDEMPADLPSLAADFVESKDVCKNYAEAKDVFLGMFLYEYARRHPDYSVVLLLRLAKTYETTLEKCCAAADPHECYAKVFDEFKPLVEEPQNLIKQNCELFEQLGEYKFQNALLVRYTKKVPQVSTPTLVEVSRNLGKVGSKCCKHPEAKRMPCAEDYLSVVLNQLCVLHEKTPVSDRVTKCCTESLVNRRPCFSALEVDETYVPKEFNAETFTFHADICTLSEKERQIKKQTALVELVKHKPKATKEQLKAVMDDFAAFVEKCCKADDKETCFAEEGKKLVAASQAALGLHHHHHH

SEQ ID NO: 238 - protein, 1097 aa, Artificial Sequence
  Synthetic peptide
QVQLVESGGGAVQPGRSLRLSCAASGFTFSNYGMHWVRQAPGKGLEWVAVISHHGSSKYYARSVKGRFTISRDNSKNTLYLEMNSLRAEDTAVYYCARDWWELVFDYWGQGTLVTVSSGGGGSGGGGSGGGGSDIVMTQTPLSLSVTPGQPASISCKSSQSLLHSDGKTFLYWYLQKPGQPPQLLIYEVSNRFSGVPDRFSGSGSGTDFTLKISRVEAEDVGVYYCLQGIHLPFTFGPGTKVEIKSGGGGSEVQLVESGGGLVQPGGSLKLSCAASGFTFNKYAMNWVRQAPGKGLEWVARIRSKYNNYATYYADSVKDRFTISRDDSKNTAYLQMNNLKTEDTAVYYCVRHGNFGNSYISYWAYWGQGTLVTVSSGGGGSGGGGSGGGGSQTVVTQEPSLTVSPGGTVTLTCGSSTGAVTSGNYPNWVQQKPGQAPRGLIGGTKFLAPGTPARFSGSLLGGKAALTLSGVQPEDEAEYYCVLWYSNRWVFGGGTKLTVLPGGGGSDAHKSEVAHRFKDLGEENFKALVLIAFAQYLQQCPFEDHVKLVNEVTEFAKTCVADESAENCDKSLHTLFGDKLCTVATLRETYGEMADCCAKQEPERNECFLQHKDDNPNLPRLVRPEVDVMCTAFHDNEETFLKKYLYEIARRHPYFYAPELLFFAKRYKAAFTECCQAADKAACLLPKLDELRDEGKASSAKQRLKCASLQKFGERAFKAWAVARLSQRFPKAEFAEVSKLVTDLTKVHTECCHGDLLECADDRADLAKYICENQDSISSKLKECCEKPLLEKSHCIAEVENDEMPADLPSLAADFVESKDVCKNYAEAKDVFLGMFLYEYARRHPDYSVVLLLRLAKTYETTLEKCCAAADPHECYAKVFDEFKPLVEEPQNLIKQNCELFEQLGEYKFQNALLVRYTKKVPQVSTPTLVEVSRNLGKVGSKCCKHPEAKRMPCAEDYLSVVLNQLCVLHEKTPVSDRVTKCCTESLVNRRPCFSALEVDETYVPKEFNAETFTFHADICTLSEKERQIKKQTALVELVKHKPKATKEQLKAVMDDFAAFVEKCCKADDKETCFAEEGKKLVAASQAALGLHHHHHH

SEQ ID NO: 239 - protein, 1099 aa, Artificial Sequence
  Synthetic peptide
QVTLKESGPMLVKPTETLTLTCTVSGFSLSNSRMGVSWIRQPPGRALEWLAHIFSNDGKSYSTSLKSRLTISKDTSKSQVVLTMTNMDPVDTATYYCARYNYDSSGYYYSFFDYWGQGTLVTVSSGGGGSGGGGSGGGGSDIQMTQSPSSLSASVGDRVTITCRASQSISSYLNWYQQKPGKAPKLLIYAASSLQSGVPSRFSGSGSGTDFTLTISSLQPEDFATYYCQQGYSSPFTFGGGTKVEIKSGGGGSEVQLVESGGGLVQPGGSLKLSCAASGFTFNKYAMNWVRQAPGKGLEWVARIRSKYNNYATYYADSVKDRFTISRDDSKNTAYLQMNNLKTEDTAVYYCVRHGNFGNSYISYWAYWGQGTLVTVSSGGGGSGGGGSGGGGSQTVVTQEPSLTVSPGGTVTLTCGSSTGAVTSGNYPNWVQQKPGQAPRGLIGGTKFLAPGTPARFSGSLLGGKAALTLSGVQPEDEAEYYCVLWYSNRWVFGGGTKLTVLPGGGGSDAHKSEVAHRFKDLGEENFKALVLIAFAQYLQQCPFEDHVKLVNEVTEFAKTCVADESAENCDKSLHTLFGDKLCTVATLRETYGEMADCCAKQEPERNECFLQHKDDNPNLPRLVRPEVDVMCTAFHDNEETFLKKYLYEIARRHPYFYAPELLFFAKRYKAAFTECCQAADKAACLLPKLDELRDEGKASSAKQRLKCASLQKFGERAFKAWAVARLSQRFPKAEFAEVSKLVTDLTKVHTECCHGDLLECADDRADLAKYICENQDSISSKLKECCEKPLLEKSHCIAEVENDEMPADLPSLAADFVESKDVCKNYAEAKDVFLGMFLYEYARRHPDYSVVLLLRLAKTYETTLEKCCAAADPHECYAKVFDEFKPLVEEPQNLIKQNCELFEQLGEYKFQNALLVRYTKKVPQVSTPTLVEVSRNLGKVGSKCCKHPEAKRMPCAEDYLSVVLNQLCVLHEKTPVSDRVTKCCTESLVNRRPCFSALEVDETYVPKEFNAETFTFHADICTLSEKERQIKKQTALVELVKHKPKATKEQLKAVMDDFAAFVEKCCKADDKETCFAEEGKKLVAASQAALGLHHHHHH

SEQ ID NO: 240 - protein, 1099 aa, Artificial Sequence
  Synthetic peptide
QVTLKESGPVLVKPTETLTLTCTVSGFSLSNARMGVSWLRQPPGKALEWLAHIFSTDEKSYSTSLKSRLTISKDTSKSQVVLTMTNMDPVDTATYYCARYYYDSSGYYYSFFDYWGQGTLVTVSSGGGGSGGGGSGGGGSDIQMTQSPSSLSASVGDRVTITCRASQSIRSYLNWYQQKPGKAPKLLIYGASNLQSGVPSRFSGSGSGTDFTLTISSLQPEDFATYYCQQSYSSPFTFGGGTKVEIKSGGGGSEVQLVESGGGLVQPGGSLKLSCAASGFTFNKYAMNWVRQAPGKGLEWVARIRSKYNNYATYYADSVKDRFTISRDDSKNTAYLQMNNLKTEDTAVYYCVRHGNFGNSYISYWAYWGQGTLVTVSSGGGGSGGGGSGGGGSQTVVTQEPSLTVSPGGTVTLTCGSSTGAVTSGNYPNWVQQKPGQAPRGLIGGTKFLAPGTPARFSGSLLGGKAALTLSGVQPEDEAEYYCVLWYSNRWVFGGGTKLTVLPGGGGSDAHKSEVAHRFKDLGEENFKALVLIAFAQYLQQCPFEDHVKLVNEVTEFAKTCVADESAENCDKSLHTLFGDKLCTVATLRETYGEMADCCAKQEPERNECFLQHKDDNPNLPRLVRPEVDVMCTAFHDNEETFLKKYLYEIARRHPYFYAPELLFFAKRYKAAFTECCQAADKAACLLPKLDELRDEGKASSAKQRLKCASLQKFGERAFKAWAVARLSQRFPKAEFAEVSKLVTDLTKVHTECCHGDLLECADDRADLAKYICENQDSISSKLKECCEKPLLEKSHCIAEVENDEMPADLPSLAADFVESKDVCKNYAEAKDVFLGMFLYEYARRHPDYSVVLLLRLAKTYETTLEKCCAAADPHECYAKVFDEFKPLVEEPQNLIKQNCELFEQLGEYKFQNALLVRYTKKVPQVSTPTLVEVSRNLGKVGSKCCKHPEAKRMPCAEDYLSVVLNQLCVLHEKTPVSDRVTKCCTESLVNRRPCFSALEVDETYVPKEFNAETFTFHADICTLSEKERQIKKQTALVELVKHKPKATKEQLKAVMDDFAAFVEKCCKADDKETCFAEEGKKLVAASQAALGLHHHHHH

SEQ ID NO: 241 - protein, 1095 aa, Artificial Sequence
  Synthetic peptide
QVQLVQSGAEVKKPGASVKVSCKASGYAFTSYYIHWVRQAPGQGLEWMGIINPSGGSKSYAQKFRGRVTMTRDTSTSTVYMELSSLTSEDTAVYYCARSMSTVTSDAFDIWGQGTMVTVSSGGGGSGGGGSGGGGSDIQMTQSPSSLSASVGDRVTITCRASQSISNYLNWYQQKPGKAPKLLIYAASSLQSGVPSRFSGSGSGTEFTLTISSLQPEDFATYYCQQSYSAPLTFGGGTKVDIKSGGGGSEVQLVESGGGLVQPGGSLKLSCAASGFTFNKYAMNWVRQAPGKGLEWVARIRSKYNNYATYYADSVKDRFTISRDDSKNTAYLQMNNLKTEDTAVYYCVRHGNFGNSYISYWAYWGQGTLVTVSSGGGGSGGGGSGGGGSQTVVTQEPSLTVSPGGTVTLTCGSSTGAVTSGNYPNWVQQKPGQAPRGLIGGTKFLAPGTPARFSGSLLGGKAALTLSGVQPEDEAEYYCVLWYSNRWVFGGGTKLTVLPGGGGSDAHKSEVAHRFKDLGEENFKALVLIAFAQYLQQCPFEDHVKLVNEVTEFAKTCVADESAENCDKSLHTLFGDKLCTVATLRETYGEMADCCAKQEPERNECFLQHKDDNPNLPRLVRPEVDVMCTAFHDNEETFLKKYLYEIARRHPYFYAPELLFFAKRYKAAFTECCQAADKAACLLPKLDELRDEGKASSAKQRLKCASLQKFGERAFKAWAVARLSQRFPKAEFAEVSKLVTDLTKVHTECCHGDLLECADDRADLAKYICENQDSISSKLKECCEKPLLEKSHCIAEVENDEMPADLPSLAADFVESKDVCKNYAEAKDVFLGMFLYEYARRHPDYSVVLLLRLAKTYETTLEKCCAAADPHECYAKVFDEFKPLVEEPQNLIKQNCELFEQLGEYKFQNALLVRYTKKVPQVSTPTLVEVSRNLGKVGSKCCKHPEAKRMPCAEDYLSVVLNQLCVLHEKTPVSDRVTKCCTESLVNRRPCFSALEVDETYVPKEFNAETFTFHADICTLSEKERQIKKQTALVELVKHKPKATKEQLKAVMDDFAAFVEKCCKADDKETCFAEEGKKLVAASQAALGLHHHHHH

SEQ ID NO: 242 - protein, 1093 aa, Artificial Sequence
  Synthetic peptide
QVQLQESGPGLVKPSETLSLTCTVSGGSISSYYWSWIRQPPGKGLEWIGYVYYSGTTNYNPSLKSRVTISVDTSKNQFSLKLSSVTAADTAVYYCASIAVTGFYFDYWGQGTLVTVSSGGGGSGGGGSGGGGSEIVLTQSPGTLSLSPGERVTLSCRASQRVNNNYLAWYQQRPGQAPRLLIYGASSRATGIPDRFSGSGSGTDFTLTISRLEPEDFAVYYCQQYDRSPLTFGGGTKLEIKSGGGGSEVQLVESGGGLVQPGGSLRLSCAASGFTFNSYAMNWVRQAPGKGLEWVARIRSKYNNYATYYADSVKGRFTISRDDSKNTAYLQMNSLKTEDTAVYYCVRHGNFGNSYVSWWAYWGQGTLVTVSSGGGGSGGGGSGGGGSQTVVTQEPSLTVSPGGTVTLTCGSSTGAVTSGNYPNWVQQKPGQAPRGLIGGTKFLAPGTPARFSGSLLGGKAALTLSGVQPEDEAEYYCVLWYSNRWVFGGGTKLTVLPGGGGSDAHKSEVAHRFKDLGEENFKALVLIAFAQYLQQCPFEDHVKLVNEVTEFAKTCVADESAENCDKSLHTLFGDKLCTVATLRETYGEMADCCAKQEPERNECFLQHKDDNPNLPRLVRPEVDVMCTAFHDNEETFLKKYLYEIARRHPYFYAPELLFFAKRYKAAFTECCQAADKAACLLPKLDELRDEGKASSAKQRLKCASLQKFGERAFKAWAVARLSQRFPKAEFAEVSKLVTDLTKVHTECCHGDLLECADDRADLAKYICENQDSISSKLKECCEKPLLEKSHCIAEVENDEMPADLPSLAADFVESKDVCKNYAEAKDVFLGMFLYEYARRHPDYSVVLLLRLAKTYETTLEKCCAAADPHECYAKVFDEFKPLVEEPQNLIKQNCELFEQLGEYKFQNALLVRYTKKVPQVSTPTLVEVSRNLGKVGSKCCKHPEAKRMPCAEDYLSVVLNQLCVLHEKTPVSDRVTKCCTESLVNRRPCFSALEVDETYVPKEFNAETFTFHADICTLSEKERQIKKQTALVELVKHKPKATKEQLKAVMDDFAAFVEKCCKADDKETCFAEEGKKLVAASQAALGLHHHHHH

SEQ ID NO: 243 - protein, 1093 aa, Artificial Sequence
  Synthetic peptide
QVQLQESGPGLVKPSETLSLTCTVSGGSISSYYWSWIRQPPGKGLEWIGYIYYSGRTNYYPSLKSRVTISIDTSKNQFSLKLSSVTAADTAVYYCARIAVAGFFFDYWGQGTLVTVSSGGGGSGGGGSGGGGSEIVLTQSPGTLSLSPGERATLSCRASQSVNKNYLAWYQQKPGQAPRLLIYGASSRATGIPDRFSGSGSGTDFTLTISRLEPEDFAVYYCQQYDRSPLTFGGGTKLEIKSGGGGSEVQLVESGGGLVQPGGSLRLSCAASGFTFNSYAMNWVRQAPGKGLEWVARIRSKYNNYATYYADSVKGRFTISRDDSKNTAYLQMNSLKTEDTAVYYCVRHGNFGNSYVSWWAYWGQGTLVTVSSGGGGSGGGGSGGGGSQTVVTQEPSLTVSPGGTVTLTCGSSTGAVTSGNYPNWVQQKPGQAPRGLIGGTKFLAPGTPARFSGSLLGGKAALTLSGVQPEDEAEYYCVLWYSNRWVFGGGTKLTVLPGGGGSDAHKSEVAHRFKDLGEENFKALVLIAFAQYLQQCPFEDHVKLVNEVTEFAKTCVADESAENCDKSLHTLFGDKLCTVATLRETYGEMADCCAKQEPERNECFLQHKDDNPNLPRLVRPEVDVMCTAFHDNEETFLKKYLYEIARRHPYFYAPELLFFAKRYKAAFTECCQAADKAACLLPKLDELRDEGKASSAKQRLKCASLQKFGERAFKAWAVARLSQRFPKAEFAEVSKLVTDLTKVHTECCHGDLLECADDRADLAKYICENQDSISSKLKECCEKPLLEKSHCIAEVENDEMPADLPSLAADFVESKDVCKNYAEAKDVFLGMFLYEYARRHPDYSVVLLLRLAKTYETTLEKCCAAADPHECYAKVFDEFKPLVEEPQNLIKQNCELFEQLGEYKFQNALLVRYTKKVPQVSTPTLVEVSRNLGKVGSKCCKHPEAKRMPCAEDYLSVVLNQLCVLHEKTPVSDRVTKCCTESLVNRRPCFSALEVDETYVPKEFNAETFTFHADICTLSEKERQIKKQTALVELVKHKPKATKEQLKAVMDDFAAFVEKCCKADDKETCFAEEGKKLVAASQAALGLHHHHHH

SEQ ID NO: 244 - protein, 1093 aa, Artificial Sequence
  Synthetic peptide
QVQLQESGPGLVKPSETLSLTCTVSGASISSFYWSWIRQPPGKGLEWIGYIYYSGTTNYNPSLKSRVTISVDTSKNQFSLKLSSVTAADTAVYYCARIAVAGFFFDYWGQGTLVTVSSGGGGSGGGGSGGGGSEIVLTQSPGTLSLSPGERATLSCRASQSVNKNYLAWYQQKPGQAPRLLIYGASSRATGIPDRFSGSGSGTDFTLTISRLEPEDFAVYYCQQYDRSPLTFGGGTKVEIKSGGGGSEVQLVESGGGLVQPGGSLRLSCAASGFTFNSYAMNWVRQAPGKGLEWVARIRSKYNNYATYYADSVKGRFTISRDDSKNTAYLQMNSLKTEDTAVYYCVRHGNFGNSYVSWWAYWGQGTLVTVSSGGGGSGGGGSGGGGSQTVVTQEPSLTVSPGGTVTLTCGSSTGAVTSGNYPNWVQQKPGQAPRGLIGGTKFLAPGTPARFSGSLLGGKAALTLSGVQPEDEAEYYCVLWYSNRWVFGGGTKLTVLPGGGGSDAHKSEVAHRFKDLGEENFKALVLIAFAQYLQQCPFEDHVKLVNEVTEFAKTCVADESAENCDKSLHTLFGDKLCTVATLRETYGEMADCCAKQEPERNECFLQHKDDNPNLPRLVRPEVDVMCTAFHDNEETFLKKYLYEIARRHPYFYAPELLFFAKRYKAAFTECCQAADKAACLLPKLDELRDEGKASSAKQRLKCASLQKFGERAFKAWAVARLSQRFPKAEFAEVSKLVTDLTKVHTECCHGDLLECADDRADLAKYICENQDSISSKLKECCEKPLLEKSHCIAEVENDEMPADLPSLAADFVESKDVCKNYAEAKDVFLGMFLYEYARRHPDYSVVLLLRLAKTYETTLEKCCAAADPHECYAKVFDEFKPLVEEPQNLIKQNCELFEQLGEYKFQNALLVRYTKKVPQVSTPTLVEVSRNLGKVGSKCCKHPEAKRMPCAEDYLSVVLNQLCVLHEKTPVSDRVTKCCTESLVNRRPCFSALEVDETYVPKEFNAETFTFHADICTLSEKERQIKKQTALVELVKHKPKATKEQLKAVMDDFAAFVEKCCKADDKETCFAEEGKKLVAASQAALGLHHHHHH

SEQ ID NO: 245 - protein, 1093 aa, Artificial Sequence
  Synthetic peptide
QVQLQESGPGLVKPSQTLSLTCTVSGASISSFYWSWIRQPPGKGLEWIGYIYYSGTTNYNPSLKSRVTISVDTSKNQFSLKLSSVTAADTAVYYCARIAVAGFFFDYWGQGTLVTVSSGGGGSGGGGSGGGGSEIVLTQSPGTLSLSPGERATLSCRASQSVNKNYLAWYQQKPGQAPRLLIYGASSRATGIPDRFSGSGSGTDFTLTISRLEPEDFAVYYCQQYDRSPLTFGGGTKVEIKSGGGGSEVQLVESGGGLVQPGGSLRLSCAASGFTFNSYAMNWVRQAPGKGLEWVARIRSKYNNYATYYADSVKGRFTISRDDSKNTAYLQMNSLKTEDTAVYYCVRHGNFGNSYVSWWAYWGQGTLVTVSSGGGGSGGGGSGGGGSQTVVTQEPSLTVSPGGTVTLTCGSSTGAVTSGNYPNWVQQKPGQAPRGLIGGTKFLAPGTPARFSGSLLGGKAALTLSGVQPEDEAEYYCVLWYSNRWVFGGGTKLTVLPGGGGSDAHKSEVAHRFKDLGEENFKALVLIAFAQYLQQCPFEDHVKLVNEVTEFAKTCVADESAENCDKSLHTLFGDKLCTVATLRETYGEMADCCAKQEPERNECFLQHKDDNPNLPRLVRPEVDVMCTAFHDNEETFLKKYLYEIARRHPYFYAPELLFFAKRYKAAFTECCQAADKAACLLPKLDELRDEGKASSAKQRLKCASLQKFGERAFKAWAVARLSQRFPKAEFAEVSKLVTDLTKVHTECCHGDLLECADDRADLAKYICENQDSISSKLKECCEKPLLEKSHCIAEVENDEMPADLPSLAADFVESKDVCKNYAEAKDVFLGMFLYEYARRHPDYSVVLLLRLAKTYETTLEKCCAAADPHECYAKVFDEFKPLVEEPQNLIKQNCELFEQLGEYKFQNALLVRYTKKVPQVSTPTLVEVSRNLGKVGSKCCKHPEAKRMPCAEDYLSVVLNQLCVLHEKTPVSDRVTKCCTESLVNRRPCFSALEVDETYVPKEFNAETFTFHADICTLSEKERQIKKQTALVELVKHKPKATKEQLKAVMDDFAAFVEKCCKADDKETCFAEEGKKLVAASQAALGLHHHHHH

SEQ ID NO: 246 - protein, 1093 aa, Artificial Sequence
  Synthetic peptide
QVQLQEWGPGLVKPSETLSLTCTVSGASISSFYWSWIRQPPGKGLEWIGYIYYSGTTNYNPSLKSRVTISVDTSKNQLSLKLSSVTAADTAVYYCARIAVAGFFFDYWGQGTLVTVSSGGGGSGGGGSGGGGSEIVLTQSPGTLSLSPGERATLSCRASQSVNKNYLAWYQQKPGQAPRLLIYGASSRATGIPDRFSGSGSGTDFTLTISRLEPEDFAVYYCQQYDRSPLTFGGGTKVDIKSGGGGSEVQLVESGGGLVQPGGSLRLSCAASGFTFNSYAMNWVRQAPGKGLEWVARIRSKYNNYATYYADSVKGRFTISRDDSKNTAYLQMNSLKTEDTAVYYCVRHGNFGNSYVSWWAYWGQGTLVTVSSGGGGSGGGGSGGGGSQTVVTQEPSLTVSPGGTVTLTCGSSTGAVTSGNYPNWVQQKPGQAPRGLIGGTKFLAPGTPARFSGSLLGGKAALTLSGVQPEDEAEYYCVLWYSNRWVFGGGTKLTVLPGGGGSDAHKSEVAHRFKDLGEENFKALVLIAFAQYLQQCPFEDHVKLVNEVTEFAKTCVADESAENCDKSLHTLFGDKLCTVATLRETYGEMADCCAKQEPERNECFLQHKDDNPNLPRLVRPEVDVMCTAFHDNEETFLKKYLYEIARRHPYFYAPELLFFAKRYKAAFTECCQAADKAACLLPKLDELRDEGKASSAKQRLKCASLQKFGERAFKAWAVARLSQRFPKAEFAEVSKLVTDLTKVHTECCHGDLLECADDRADLAKYICENQDSISSKLKECCEKPLLEKSHCIAEVENDEMPADLPSLAADFVESKDVCKNYAEAKDVFLGMFLYEYARRHPDYSVVLLLRLAKTYETTLEKCCAAADPHECYAKVFDEFKPLVEEPQNLIKQNCELFEQLGEYKFQNALLVRYTKKVPQVSTPTLVEVSRNLGKVGSKCCKHPEAKRMPCAEDYLSVVLNQLCVLHEKTPVSDRVTKCCTESLVNRRPCFSALEVDETYVPKEFNAETFTFHADICTLSEKERQIKKQTALVELVKHKPKATKEQLKAVMDDFAAFVEKCCKADDKETCFAEEGKKLVAASQAALGLHHHHHH

SEQ ID NO: 247 - protein, 1093 aa, Artificial Sequence
  Synthetic peptide
QVQLQESGPGLVKPSETLSLTCTVSGASISSFYWSWIRQPPGKGLEWIGYIYYSGTTNYNPSLKSRVTISVDTSKNQFSLKLSSVTAADTAVYYCARIAVAGFFFDYWGQGTLVTVSSGGGGSGGGGSGGGGSEIVLTQSPGTLSLSPGESATLSCRASQSVNKNYLAWYQQKPGQAPRLLIYGASSRATGIPDRFSGSGSGTDFTLTISRLEPEDFAVYYCQQYDRSPLTFGGGTRLEIKSGGGGSEVQLVESGGGLVQPGGSLRLSCAASGFTFNSYAMNWVRQAPGKGLEWVARIRSKYNNYATYYADSVKGRFTISRDDSKNTAYLQMNSLKTEDTAVYYCVRHGNFGNSYVSWWAYWGQGTLVTVSSGGGGSGGGGSGGGGSQTVVTQEPSLTVSPGGTVTLTCGSSTGAVTSGNYPNWVQQKPGQAPRGLIGGTKFLAPGTPARFSGSLLGGKAALTLSGVQPEDEAEYYCVLWYSNRWVFGGGTKLTVLPGGGGSDAHKSEVAHRFKDLGEENFKALVLIAFAQYLQQCPFEDHVKLVNEVTEFAKTCVADESAENCDKSLHTLFGDKLCTVATLRETYGEMADCCAKQEPERNECFLQHKDDNPNLPRLVRPEVDVMCTAFHDNEETFLKKYLYEIARRHPYFYAPELLFFAKRYKAAFTECCQAADKAACLLPKLDELRDEGKASSAKQRLKCASLQKFGERAFKAWAVARLSQRFPKAEFAEVSKLVTDLTKVHTECCHGDLLECADDRADLAKYICENQDSISSKLKECCEKPLLEKSHCIAEVENDEMPADLPSLAADFVESKDVCKNYAEAKDVFLGMFLYEYARRHPDYSVVLLLRLAKTYETTLEKCCAAADPHECYAKVFDEFKPLVEEPQNLIKQNCELFEQLGEYKFQNALLVRYTKKVPQVSTPTLVEVSRNLGKVGSKCCKHPEAKRMPCAEDYLSVVLNQLCVLHEKTPVSDRVTKCCTESLVNRRPCFSALEVDETYVPKEFNAETFTFHADICTLSEKERQIKKQTALVELVKHKPKATKEQLKAVMDDFAAFVEKCCKADDKETCFAEEGKKLVAASQAALGLHHHHHH

SEQ ID NO: 248 - protein, 1093 aa, Artificial Sequence
  Synthetic peptide
QVQLQESGPGLVKPSQTLSLTCTVSGGSISSYYWSWIRQPPGKGLEWIGYIFYNGITNYNPSLKSRVTISLDTSKNQFSLKLSSVTAADTAKYYCARIHSGSFSFDYWDQGTLVTVSSGGGGSGGGGSGGGGSEIVMTQSPGTLSLSPGERATLSCRASQSVSRGYLAWYQQKPGQAPRLLIYGASSRATDIPDRFSGSGSGTDFTLTISRLEPEDFAVYYCQQYDTSPITFGQGTKVEIKSGGGGSEVQLVESGGGLVQPGGSLRLSCAASGFTFNSYAMNWVRQAPGKGLEWVARIRSKYNNYATYYADSVKGRFTISRDDSKNTAYLQMNSLKTEDTAVYYCVRHGNFGNSYVSWWAYWGQGTLVTVSSGGGGSGGGGSGGGGSQTVVTQEPSLTVSPGGTVTLTCGSSTGAVTSGNYPNWVQQKPGQAPRGLIGGTKFLAPGTPARFSGSLLGGKAALTLSGVQPEDEAEYYCVLWYSNRWVFGGGTKLTVLPGGGGSDAHKSEVAHRFKDLGEENFKALVLIAFAQYLQQCPFEDHVKLVNEVTEFAKTCVADESAENCDKSLHTLFGDKLCTVATLRETYGEMADCCAKQEPERNECFLQHKDDNPNLPRLVRPEVDVMCTAFHDNEETFLKKYLYEIARRHPYFYAPELLFFAKRYKAAFTECCQAADKAACLLPKLDELRDEGKASSAKQRLKCASLQKFGERAFKAWAVARLSQRFPKAEFAEVSKLVTDLTKVHTECCHGDLLECADDRADLAKYICENQDSISSKLKECCEKPLLEKSHCIAEVENDEMPADLPSLAADFVESKDVCKNYAEAKDVFLGMFLYEYARRHPDYSVVLLLRLAKTYETTLEKCCAAADPHECYAKVFDEFKPLVEEPQNLIKQNCELFEQLGEYKFQNALLVRYTKKVPQVSTPTLVEVSRNLGKVGSKCCKHPEAKRMPCAEDYLSVVLNQLCVLHEKTPVSDRVTKCCTESLVNRRPCFSALEVDETYVPKEFNAETFTFHADICTLSEKERQIKKQTALVELVKHKPKATKEQLKAVMDDFAAFVEKCCKADDKETCFAEEGKKLVAASQAALGLHHHHHH

SEQ ID NO: 249 - protein, 1102 aa, Artificial Sequence
  Synthetic peptide
QVQLVQSGAEVKKPGASVKVSCKASGYTFTSYYMHWVRQAPGQGLEWMGIINPSDGSTNYAQNFQGRVTMTRDTSTNTVYMELSSLRSEDTAVYYCARGGNSAFYSYYDMDVWGQGTTVTVSSGGGGSGGGGSGGGGSDVVMTQSPLSLPVTLGQPASISCRSSQSLVYRDGNTYLSWFQQRPGQSPRRLIYKVSNWQSGVPDRFSGSGSGTDFTLKISRVEAEDVGVYFCMQGTHWPPTFGQGTKVEIKSGGGGSEVQLVESGGGLVQPGGSLRLSCAASGFTFNSYAMNWVRQAPGKGLEWVARIRSKYNNYATYYADSVKGRFTISRDDSKNTAYLQMNSLKTEDTAVYYCVRHGNFGNSYVSWWAYWGQGTLVTVSSGGGGSGGGGSGGGGSQTVVTQEPSLTVSPGGTVTLTCGSSTGAVTSGNYPNWVQQKPGQAPRGLIGGTKFLAPGTPARFSGSLLGGKAALTLSGVQPEDEAEYYCVLWYSNRWVFGGGTKLTVLPGGGGSDAHKSEVAHRFKDLGEENFKALVLIAFAQYLQQCPFEDHVKLVNEVTEFAKTCVADESAENCDKSLHTLFGDKLCTVATLRETYGEMADCCAKQEPERNECFLQHKDDNPNLPRLVRPEVDVMCTAFHDNEETFLKKYLYEIARRHPYFYAPELLFFAKRYKAAFTECCQAADKAACLLPKLDELRDEGKASSAKQRLKCASLQKFGERAFKAWAVARLSQRFPKAEFAEVSKLVTDLTKVHTECCHGDLLECADDRADLAKYICENQDSISSKLKECCEKPLLEKSHCIAEVENDEMPADLPSLAADFVESKDVCKNYAEAKDVFLGMFLYEYARRHPDYSVVLLLRLAKTYETTLEKCCAAADPHECYAKVFDEFKPLVEEPQNLIKQNCELFEQLGEYKFQNALLVRYTKKVPQVSTPTLVEVSRNLGKVGSKCCKHPEAKRMPCAEDYLSVVLNQLCVLHEKTPVSDRVTKCCTESLVNRRPCFSALEVDETYVPKEFNAETFTFHADICTLSEKERQIKKQTALVELVKHKPKATKEQLKAVMDDFAAFVEKCCKADDKETCFAEEGKKLVAASQAALGLHHHHHH

SEQ ID NO: 250 - protein, 1102 aa, Artificial Sequence
  Synthetic peptide
QVQLVQSGAEVKKPGASVKVSCKASGYTFTNYYMHWVRQAPGLGLEWMGIINPSDGSTSYAQKFQGRVTMTRDTSTNTVYMDLSSLRSEDTAVYYCARGGNSAFYSYYDMDVWGQGTTVTVSSGGGGSGGGGSGGGGSDVVMTQTPLSLPVTLGQPASISCRSSQSLVYRDGNTYLSWFQQRPGQSPRRLIYKVSNWQSGVPDRFSGGGSGTDFTLKISRVEAEDVGVYYCMQGTHWPPTFGQGTKVEIKSGGGGSEVQLVESGGGLVQPGGSLRLSCAASGFTFNSYAMNWVRQAPGKGLEWVARIRSKYNNYATYYADSVKGRFTISRDDSKNTAYLQMNSLKTEDTAVYYCVRHGNFGNSYVSWWAYWGQGTLVTVSSGGGGSGGGGSGGGGSQTVVTQEPSLTVSPGGTVTLTCGSSTGAVTSGNYPNWVQQKPGQAPRGLIGGTKFLAPGTPARFSGSLLGGKAALTLSGVQPEDEAEYYCVLWYSNRWVFGGGTKLTVLPGGGGSDAHKSEVAHRFKDLGEENFKALVLIAFAQYLQQCPFEDHVKLVNEVTEFAKTCVADESAENCDKSLHTLFGDKLCTVATLRETYGEMADCCAKQEPERNECFLQHKDDNPNLPRLVRPEVDVMCTAFHDNEETFLKKYLYEIARRHPYFYAPELLFFAKRYKAAFTECCQAADKAACLLPKLDELRDEGKASSAKQRLKCASLQKFGERAFKAWAVARLSQRFPKAEFAEVSKLVTDLTKVHTECCHGDLLECADDRADLAKYICENQDSISSKLKECCEKPLLEKSHCIAEVENDEMPADLPSLAADFVESKDVCKNYAEAKDVFLGMFLYEYARRHPDYSVVLLLRLAKTYETTLEKCCAAADPHECYAKVFDEFKPLVEEPQNLIKQNCELFEQLGEYKFQNALLVRYTKKVPQVSTPTLVEVSRNLGKVGSKCCKHPEAKRMPCAEDYLSVVLNQLCVLHEKTPVSDRVTKCCTESLVNRRPCFSALEVDETYVPKEFNAETFTFHADICTLSEKERQIKKQTALVELVKHKPKATKEQLKAVMDDFAAFVEKCCKADDKETCFAEEGKKLVAASQAALGLHHHHHH

SEQ ID NO: 251 - protein, 1102 aa, Homo sapiens
QVQLVQSGAEVKKPGASVKVSCKASGYTFTGYYIHWVRQAPGQGLEWMGIINPSDGSTSYGQNFQGRVTMTRDTSTNTVYMELSSLRSEDTAVYYCARGGNSAFYSYYDMDVWGQGTTVTVSSGGGGSGGGGSGGGGSDVVMTQSPLSLPVTLGQPASISCRSSQSLAYRDGNTYLSWFQQRPGQSPRRLIYKVSNWQSGVPDRFSGSGSGTDFTLKISRVEAEDVGVYFCMQGTHWPPTFGQGTKVEIKSGGGGSEVQLVESGGGLVQPGGSLRLSCAASGFTFNSYAMNWVRQAPGKGLEWVARIRSKYNNYATYYADSVKGRFTISRDDSKNTAYLQMNSLKTEDTAVYYCVRHGNFGNSYVSWWAYWGQGTLVTVSSGGGGSGGGGSGGGGSQTVVTQEPSLTVSPGGTVTLTCGSSTGAVTSGNYPNWVQQKPGQAPRGLIGGTKFLAPGTPARFSGSLLGGKAALTLSGVQPEDEAEYYCVLWYSNRWVFGGGTKLTVLPGGGGSDAHKSEVAHRFKDLGEENFKALVLIAFAQYLQQCPFEDHVKLVNEVTEFAKTCVADESAENCDKSLHTLFGDKLCTVATLRETYGEMADCCAKQEPERNECFLQHKDDNPNLPRLVRPEVDVMCTAFHDNEETFLKKYLYEIARRHPYFYAPELLFFAKRYKAAFTECCQAADKAACLLPKLDELRDEGKASSAKQRLKCASLQKFGERAFKAWAVARLSQRFPKAEFAEVSKLVTDLTKVHTECCHGDLLECADDRADLAKYICENQDSISSKLKECCEKPLLEKSHCIAEVENDEMPADLPSLAADFVESKDVCKNYAEAKDVFLGMFLYEYARRHPDYSVVLLLRLAKTYETTLEKCCAAADPHECYAKVFDEFKPLVEEPQNLIKQNCELFEQLGEYKFQNALLVRYTKKVPQVSTPTLVEVSRNLGKVGSKCCKHPEAKRMPCAEDYLSVVLNQLCVLHEKTPVSDRVTKCCTESLVNRRPCFSALEVDETYVPKEFNAETFTFHADICTLSEKERQIKKQTALVELVKHKPKATKEQLKAVMDDFAAFVEKCCKADDKETCFAEEGKKLVAASQAALGLHHHHHH

SEQ ID NO: 252 - protein, 618 aa, Homo sapiens
MVSPRMSGLLSQTVILALIFLPQTRPAGVFELQIHSFGPGPGPGAPRSPCSARLPCRLFFRVCLKPGLSEEAAESPCALGAALSARGPVYTEQPGAPAPDLPLPDGLLQVPFRDAWPGTFSFIIETWREELGDQIGGPAWSLLARVAGRRRLAAGGPWARDIQRAGAWELRFSYRARCEPPAVGTACTRLCRPRSAPSRCGPGLRPCAPLEDECEAPLVCRAGCSPEHGFCEQPGECRCLEGWTGPLCTVPVSTSSCLSPRGPSSATTGCLVPGPGPCDGNPCANGGSCSETPRSFECTCPRGFYGLRCEVSGVTCADGPCFNGGLCVGGADPDSAYICHCPPGFQGSNCEKRVDRCSLQPCRNGGLCLDLGHALRCRCRAGFAGPRCEHDLDDCAGRACANGGTCVEGGGAHRCSCALGFGGRDCRERADPCAARPCAHGGRCYAHFSGLVCACAPGYMGARCEFPVHPDGASALPAAPPGLRPGDPQRYLLPPALGLLVAAGVAGAALLLVHVRRRGHSQDAGSRLLAGTPEPSVHALPDALNNLRTQEGSGDGPSSSVDWNRPEDVDPQGIYVISAPSIYAREVATPLFPPLHTGRAGQRQHLLFPYPSSILSVK

SEQ ID NO: 253 - protein, 492 aa, Homo sapiens
MVSPRMSGLLSQTVILALIFLPQTRPAGVFELQIHSFGPGPGPGAPRSPCSARLPCRLFFRVCLKPGLSEEAAESPCALGAALSARGPVYTEQPGAPAPDLPLPDGLLQVPFRDAWPGTFSFIIETWREELGDQIGGPAWSLLARVAGRRRLAAGGPWARDIQRAGAWELRFSYRARCEPPAVGTACTRLCRPRSAPSRCGPGLRPCAPLEDECEAPLVCRAGCSPEHGFCEQPGECRCLEGWTGPLCTVPVSTSSCLSPRGPSSATTGCLVPGPGPCDGNPCANGGSCSETPRSFECTCPRGFYGLRCEVSGVTCADGPCFNGGLCVGGADPDSAYICHCPPGFQGSNCEKRVDRCSLQPCRNGGLCLDLGHALRCRCRAGFAGPRCEHDLDDCAGRACANGGTCVEGGGAHRCSCALGFGGRDCRERADPCAARPCAHGGRCYAHFSGLVCACAPGYMGARCEFPVHPDGASALPAAPPGLRPGDPQRYL

SEQ ID NO: 254 - protein, 175 aa, Homo sapiens
MVSPRMSGLLSQTVILALIFLPQTRPAGVFELQIHSFGPGPGPGAPRSPCSARLPCRLFFRVCLKPGLSEEAAESPCALGAALSARGPVYTEQPGAPAPDLPLPDGLLQVPFRDAWPGTFSFIIETWREELGDQIGGPAWSLLARVAGRRRLAAGGPWARDIQRAGAWELRFSYR

SEQ ID NO: 255 - protein, 40 aa, Homo sapiens
ARCEPPAVGTACTRLCRPRSAPSRCGPGLRPCAPLEDECE

SEQ ID NO: 256 - protein, 34 aa, Homo sapiens
APLVCRAGCSPEHGFCEQPGECRCLEGWTGPLCT

SEQ ID NO: 257 - protein, 37 aa, Homo sapiens
GPGPCDGNPCANGGSCSETPRSFECTCPRGFYGLRCE

SEQ ID NO: 258 - protein, 40 aa, Homo sapiens
SGVTCADGPCFNGGLCVGGADPDSAYICHCPPGFQGSNCE

SEQ ID NO: 259 - protein, 37 aa, Homo sapiens
RVDRCSLQPCRNGGLCLDLGHALRCRCRAGFAGPRCE

SEQ ID NO: 260 - protein, 78 aa, Homo sapiens
SGVTCADGPCFNGGLCVGGADPDSAYICHCPPGFQGSNCEKRVDRCSLQPCRNGGLCLDLGHALRCRCRAGFAGPRCE

SEQ ID NO: 261 - protein, 37 aa, Homo sapiens
DLDDCAGRACANGGTCVEGGGAHRCSCALGFGGRDCR

SEQ ID NO: 262 - protein, 37 aa, Homo sapiens
RADPCAARPCAHGGRCYAHFSGLVCACAPGYMGARCE

SEQ ID NO: 263 - protein, 548 aa, Artificial Sequence
  Synthetic peptide
MVSPRMSGLLSQTVILALIFLPQTRPAGVFELQIHSFGPGPGPGAPRSPCSARLPCRLFFRVCLKPGLSEEAAESPCALGAALSARGPVYTEQPGAPAPDLPLPDGLLQVPFRDAWPGTFSFIIETWREELGDQIGGPAWSLLARVAGRRRLAAGGPWARDIQRAGAWELRFSYRARCEPPAVGTACTRLCRPRSAPSRCGPGLRPCAPLEDECEAPLVCRAGCSPEHGFCEQPGECRCLEGWTGPLCTVPVSTSSCLSPRGPSSATTGCLVPGPGPCDGNPCANGGSCSETPRSFECTCPRGFYGLRCEVSGVTCADGPCFNGGLCVGGADPDSAYICHCPPGFQGSNCEKRVDRCSLQPCRNGGLCLDLGHALRCRCRAGFAGPRCEHDLDDCAGRACANGGTCVEGGGAHRCSCALGFGGRDCRERADPCAARPCAHGGRCYAHFSGLVCACAPGYMGARCEFPVHPDGASALPAAPPGLRPGDPQRYLSGGGGSGAGVIAVIVVVVIAIVAGIVVLVISRKKRMAKYEKAEIKEMGEMHRELNA

SEQ ID NO: 264 - protein, 408 aa, Artificial Sequence
  Synthetic peptide
MGWSCIILFLVATATGVHSGKPIPNPLLGLDSTSGARCEPPAVGTACTRLCRPRSAPSRCGPGLRPCAPLEDECEAPLVCRAGCSPEHGFCEQPGECRCLEGWTGPLCTVPVSTSSCLSPRGPSSATTGCLVPGPGPCDGNPCANGGSCSETPRSFECTCPRGFYGLRCEVSGVTCADGPCFNGGLCVGGADPDSAYICHCPPGFQGSNCEKRVDRCSLQPCRNGGLCLDLGHALRCRCRAGFAGPRCEHDLDDCAGRACANGGTCVEGGGAHRCSCALGFGGRDCRERADPCAARPCAHGGRCYAHFSGLVCACAPGYMGARCEFPVHPDGASALPAAPPGLRPGDPQRYLSGGGGSGAGVIAVIVVVVIAIVAGIVVLVISRKKRMAKYEKAEIKEMGEMHRELNA

SEQ ID NO: 265 - protein, 368 aa, Artificial Sequence
  Synthetic peptide
MGWSCIILFLVATATGVHSGKPIPNPLLGLDSTSGAPLVCRAGCSPEHGFCEQPGECRCLEGWTGPLCTVPVSTSSCLSPRGPSSATTGCLVPGPGPCDGNPCANGGSCSETPRSFECTCPRGFYGLRCEVSGVTCADGPCFNGGLCVGGADPDSAYICHCPPGFQGSNCEKRVDRCSLQPCRNGGLCLDLGHALRCRCRAGFAGPRCEHDLDDCAGRACANGGTCVEGGGAHRCSCALGFGGRDCRERADPCAARPCAHGGRCYAHFSGLVCACAPGYMGARCEFPVHPDGASALPAAPPGLRPGDPQRYLSGGGGSGAGVIAVIVVVVIAIVAGIVVLVISRKKRMAKYEKAEIKEMGEMHRELNA

SEQ ID NO: 266 - protein, 310 aa, Artificial Sequence
  Synthetic peptide
MGWSCIILFLVATATGVHSGKPIPNPLLGLDSTSGGPGPCDGNPCANGGSCSETPRSFECTCPRGFYGLRCEVSGVTCADGPCFNGGLCVGGADPDSAYICHCPPGFQGSNCEKRVDRCSLQPCRNGGLCLDLGHALRCRCRAGFAGPRCEHDLDDCAGRACANGGTCVEGGGAHRCSCALGFGGRDCRERADPCAARPCAHGGRCYAHFSGLVCACAPGYMGARCEFPVHPDGASALPAAPPGLRPGDPQRYLSGGGGSGAGVIAVIVVVVIAIVAGIVVLVISRKKRMAKYEKAEIKEMGEMHRELNA

SEQ ID NO: 267 - protein, 272 aa, Artificial Sequence
  Synthetic peptide
MGWSCIILFLVATATGVHSGKPIPNPLLGLDSTSGSGVTCADGPCFNGGLCVGGADPDSAYICHCPPGFQGSNCEKRVDRCSLQPCRNGGLCLDLGHALRCRCRAGFAGPRCEHDLDDCAGRACANGGTCVEGGGAHRCSCALGFGGRDCRERADPCAARPCAHGGRCYAHFSGLVCACAPGYMGARCEFPVHPDGASALPAAPPGLRPGDPQRYLSGGGGSGAGVIAVIVVVVIAIVAGIVVLVISRKKRMAKYEKAEIKEMGEMHRELNA

SEQ ID NO: 268 - protein, 231 aa, Artificial Sequence
  Synthetic peptide
MGWSCIILFLVATATGVHSGKPIPNPLLGLDSTSGRVDRCSLQPCRNGGLCLDLGHALRCRCRAGFAGPRCEHDLDDCAGRACANGGTCVEGGGAHRCSCALGFGGRDCRERADPCAARPCAHGGRCYAHFSGLVCACAPGYMGARCEFPVHPDGASALPAAPPGLRPGDPQRYLSGGGGSGAGVIAVIVVVVIAIVAGIVVLVISRKKRMAKYEKAEIKEMGEMHRELNA

SEQ ID NO: 269 - protein, 193 aa, Artificial Sequence
  Synthetic peptide
MGWSCIILFLVATATGVHSGKPIPNPLLGLDSTSGDLDDCAGRACANGGTCVEGGGAHRCSCALGFGGRDCRERADPCAARPCAHGGRCYAHFSGLVCACAPGYMGARCEFPVHPDGASALPAAPPGLRPGDPQRYLSGGGGSGAGVIAVIVVVVIAIVAGIVVLVISRKKRMAKYEKAEIKEMGEMHRELNA

SEQ ID NO: 270 - protein, 155 aa, Artificial Sequence
  Synthetic peptide
MGWSCIILFLVATATGVHSGKPIPNPLLGLDSTSGRADPCAARPCAHGGRCYAHFSGLVCACAPGYMGARCEFPVHPDGASALPAAPPGLRPGDPQRYLSGGGGSGAGVIAVIVVVVIAIVAGIVVLVISRKKRMAKYEKAEIKEMGEMHRELNA

SEQ ID NO: 271 - protein, 587 aa, Macaca fascicularis
MVSPRMSRLLSQTVILALIFIPQARPAGVFELQIHSFGPGPGPGAPRSPCSARGPCRLFFRVCLKPGLSEEAAESPCALGAALSARGPVYTEQPEAPAPDLPLPNGLLQVPFRDAWPGTFSLIIETWREELGDQIGGPAWSLLARVTRRRRLAAGGPWARDIQRAGAWELRFSYRARCELPAVGTACTRLCRPRSAPSRCGPGLRPCAPLEDECEAPPVCRAGCSLEHGFCEQPGECRCLEGWTGPLCMVPASTSSCLGLRGPSSATTGCLVPGPGPCDGNPCANGGSCSETPGSFECTCPRGFYGLRCEVSGVTCADGPCFNGGLCVGGADPDSAYICHCPPGFQGSNCEKRVDRCSLQPCRNGGLCLDLGHALRCRCRAGFAGPRCEHNLDDCAGRACANGGTCVEGGGAHRCSCALGFGGRDCRERADPCAARPCAHGGRCYAHFSGLVCACAPGYMGSRCEFPVHPDGVSALPAAPPGLRPGDPQRYLLPPALGLLVAAGVAGAALLLVHVRRRGHAQDAGSRLLAGTPEPSVHALPDALNNQRTQEGPGDVPSSSVDWNRPEDVDSRGIYVISAPSIYAREA

SEQ ID NO: 272 - protein, 492 aa, Macaca fascicularis
MVSPRMSRLLSQTVILALIFIPQARPAGVFELQIHSFGPGPGPGAPRSPCSARGPCRLFFRVCLKPGLSEEAAESPCALGAALSARGPVYTEQPEAPAPDLPLPNGLLQVPFRDAWPGTFSLIIETWREELGDQIGGPAWSLLARVTRRRRLAAGGPWARDIQRAGAWELRFSYRARCELPAVGTACTRLCRPRSAPSRCGPGLRPCAPLEDECEAPPVCRAGCSLEHGFCEQPGECRCLEGWTGPLCMVPASTSSCLGLRGPSSATTGCLVPGPGPCDGNPCANGGSCSETPGSFECTCPRGFYGLRCEVSGVTCADGPCFNGGLCVGGADPDSAYICHCPPGFQGSNCEKRVDRCSLQPCRNGGLCLDLGHALRCRCRAGFAGPRCEHNLDDCAGRACANGGTCVEGGGAHRCSCALGFGGRDCRERADPCAARPCAHGGRCYAHFSGLVCACAPGYMGSRCEFPVHPDGVSALPAAPPGLRPGDPQRYL

SEQ ID NO: 273 - protein, 175 aa, Macaca fascicularis
MVSPRMSRLLSQTVILALIFIPQARPAGVFELQIHSFGPGPGPGAPRSPCSARGPCRLFFRVCLKPGLSEEAAESPCALGAALSARGPVYTEQPEAPAPDLPLPNGLLQVPFRDAWPGTFSLIIETWREELGDQIGGPAWSLLARVTRRRRLAAGGPWARDIQRAGAWELRFSYR

SEQ ID NO: 274 - protein, 40 aa, Macaca fascicularis
ARCELPAVGTACTRLCRPRSAPSRCGPGLRPCAPLEDECE

SEQ ID NO: 275 - protein, 34 aa, Macaca fascicularis
APPVCRAGCSLEHGFCEQPGECRCLEGWTGPLCM

SEQ ID NO: 276 - protein, 37 aa, Macaca fascicularis
GPGPCDGNPCANGGSCSETPGSFECTCPRGFYGLRCE

SEQ ID NO: 277 - protein, 40 aa, Macaca fascicularis; identical to SEQ ID NO: 258

SEQ ID NO: 278 - protein, 37 aa, Macaca fascicularis; identical to SEQ ID NO: 259

SEQ ID NO: 279 - protein, 78 aa, Macaca fascicularis; identical to SEQ ID NO: 260

SEQ ID NO: 280 - protein, 37 aa, Macaca fascicularis
NLDDCAGRACANGGTCVEGGGAHRCSCALGFGGRDCR

SEQ ID NO: 281 - protein, 37 aa, Macaca fascicularis
RADPCAARPCAHGGRCYAHFSGLVCACAPGYMGSRCE

SEQ ID NO: 282 - protein, 548 aa, Artificial Sequence
  Synthetic peptide
MVSPRMSRLLSQTVILALIFIPQARPAGVFELQIHSFGPGPGPGAPRSPCSARGPCRLFFRVCLKPGLSEEAAESPCALGAALSARGPVYTEQPEAPAPDLPLPNGLLQVPFRDAWPGTFSLIIETWREELGDQIGGPAWSLLARVTRRRRLAAGGPWARDIQRAGAWELRFSYRARCELPAVGTACTRLCRPRSAPSRCGPGLRPCAPLEDECEAPPVCRAGCSLEHGFCEQPGECRCLEGWTGPLCMVPASTSSCLGLRGPSSATTGCLVPGPGPCDGNPCANGGSCSETPGSFECTCPRGFYGLRCEVSGVTCADGPCFNGGLCVGGADPDSAYICHCPPGFQGSNCEKRVDRCSLQPCRNGGLCLDLGHALRCRCRAGFAGPRCEHNLDDCAGRACANGGTCVEGGGAHRCSCALGFGGRDCRERADPCAARPCAHGGRCYAHFSGLVCACAPGYMGSRCEFPVHPDGVSALPAAPPGLRPGDPQRYLSGGGGSGAGVIAVIVVVVIAIVAGIVVLVISRKKRMAKYEKAEIKEMGEMHRELNA

SEQ ID NO: 283 - protein, 723 aa, Homo sapiens
MGSRCALALAVLSALLCQVWSSGVFELKLQEFVNKKGLLGNRNCCRGGAGPPPCACRTFFRVCLKHYQASVSPEPPCTYGSAVTPVLGVDSFSLPDGGGADSAFSNPIRFPFGFTWPGTFSLIIEALHTDSPDDLATENPERLISRLATQRHLTVGEEWSQDLHSSGRTDLKYSYRFVCDEHYYGEGCSVFCRPRDDAFGHFTCGERGEKVCNPGWKGPYCTEPICLPGCDEQHGFCDKPGECKCRVGWQGRYCDECIRYPGCLHGTCQQPWQCNCQEGWGGLFCNQDLNYCTHHKPCKNGATCTNTGQGSYTCSCRPGYTGATCELGIDECDPSPCKNGGSCTDLENSYSCTCPPGFYGKICELSAMTCADGPCFNGGRCSDSPDGGYSCRCPVGYSGFNCEKKIDYCSSSPCSNGAKCVDLGDAYLCRCQAGFSGRHCDDNVDDCASSPCANGGTCRDGVNDFSCTCPPGYTGRNCSAPVSRCEHAPCHNGATCHERGHRYVCECARGYGGPNCQFLLPELPPGPAVVDLTEKLEGQGGPFPWVAVCAGVILVLMLLLGCAAVVVCVRLRLQKHRPPADPCRGETETMNNLANCQREKDISVSIIGATQIKNTNKKADFHGDHSADKNGFKARYPAVDYNLVQDLKGDDTAVRDAHSKRDTKCQPQGSSGEEKGTPTTLRGGEASERKRPDSGCSTSKDTKYQSVYVISEEKDECVIATEV

SEQ ID NO: 284 - protein, 685 aa, Homo sapiens
MAAASRSASGWALLLLVALWQQRAAGSGVFQLQLQEFINERGVLASGRPCEPGCRTFFRVCLKHFQAVVSPGPCTFGTVSTPVLGTNSFAVRDDSSGGGRNPLQLPFNFTWPGTFSLIIEAWHAPGDDLRPEALPPDALISKIAIQGSLAVGQNWLLDEQTSTLTRLRYSYRVICSDNYYGDNCSRLCKKRNDHFGHYVCQPDGNLSCLPGWTGEYCQQPICLSGCHEQNGYCSKPAECLCRPGWQGRLCNECIPHNGCRHGTCSTPWQCTCDEGWGGLFCDQDLNYCTHHSPCKNGATCSNSGQRSYTCTCRPGYTGVDCELELSECDSNPCRNGGSCKDQEDGYHCLCPPGYYGLHCEHSTLSCADSPCFNGGSCRERNQGANYACECPPNFTGSNCEKKVDRCTSNPCANGGQCLNRGPSRMCRCRPGFTGTYCELHVSDCARNPCAHGGTCHDLENGLMCTCPAGFSGRRCEVRTSIDACASSPCFNRATCYTDLSTDTFVCNCPYGFVGSRCEFPVGLPPSFPWVAVSLGVGLAVLLVLLGMVAVAVRQLRLRRPDDGSREAMNNLSDFQKDNLIPAAQLKNTNQKKELEVDCGLDKSNCGKQQNHTLDYNLAPGPLGRGTMPGKFPHSDKSLGEKAPLRLHSEKPECRISAICSPRDSMYQSVCLISEERNECVIATEV

SEQ ID NO: 285 - protein, 4 aa, Artificial Sequence
  Synthetic peptide
GGGG

SEQ ID NO: 286 - protein, 5 aa, Artificial Sequence
  Synthetic peptide
GGGGS

SEQ ID NO: 287 - protein, 5 aa, Artificial Sequence
  Synthetic peptide
GGGGQ

SEQ ID NO: 288 - protein, 6 aa, Artificial Sequence
  Synthetic peptide
SGGGGS

SEQ ID NO: 289 - protein, 6 aa, Artificial Sequence
  Synthetic peptide
PGGGGS

SEQ ID NO: 290 - protein, 6 aa, Artificial Sequence
  Synthetic peptide
PGGDGS

SEQ ID NO: 291 - protein, 9 aa, Artificial Sequence
  Synthetic peptide
GGGGSGGGS

SEQ ID NO: 292 - protein, 10 aa, Artificial Sequence
  Synthetic peptide
GGGGSGGGGS

SEQ ID NO: 293 - protein, 15 aa, Artificial Sequence
  Synthetic peptide
GGGGSGGGGSGGGGS

SEQ ID NO: 294 - protein, 6 aa, Artificial Sequence
  Synthetic peptide
HHHHHH

SEQ ID NO: 295 - protein, 16 aa, Artificial Sequence
  Synthetic peptide
RDWDFDVFGGGTPVGG

SEQ ID NO: 296 - protein, 16 aa, Artificial Sequence
  Synthetic peptide
  misc_feature (12)..(12): Xaa can be any naturally occurring amino acid
QRFVTGHFGGLXPANG

SEQ ID NO: 297 - protein, 16 aa, Artificial Sequence
  Synthetic peptide
QRFVTGHFGGLYPANG

SEQ ID NO: 298 - protein, 16 aa, Artificial Sequence
  Synthetic peptide
QRFVTGHFGGLHPANG

SEQ ID NO: 299 - protein, 9 aa, Artificial Sequence
  Synthetic peptide
TGHFGGLHP

SEQ ID NO: 300 - protein, 16 aa, Artificial Sequence
  Synthetic peptide
QRFCTGHFGGLHPCNG

SEQ ID NO: 301 - protein, 585 aa, Homo sapiens [sequence omitted]

SEQ ID NO: 302 - protein, 585 aa, Artificial Sequence
  Synthetic peptide
DAHKSEVAHRFKDLGEENFKALVLIAFAQYLQQCPFEDHVKLVNEVTEFAKTCVADESAENCDKSLHTLFGDKLCTVATLRETYGEMADCCAKQEPERNECFLQHKDDNPNLPRLVRPEVDVMCTAFHDNEETFLKKYLYEIARRHPYFYAPELLFFAKRYKAAFTECCQAADKAACLLPKLDELRDEGKASSAKQRLKCASLQKFGERAFKAWAVARLSQRFPKAEFAEVSKLVTDLTKVHTECCHGDLLECADDRADLAKYICENQDSISSKLKECCEKPLLEKSHCIAEVENDEMPADLPSLAADFVESKDVCKNYAEAKDVFLGMFLYEYARRHPDYSVVLLLRLAKTYETTLEKCCAAADPHECYAKVFDEFKPLVEEPQNLIKQNCELFEQLGEYKFQNALLVRYTKKVPQVSTPTLVEVSRNLGKVGSKCCKHPEAKRMPCAEDYLSVVLNQLCVLHEKTPVSDRVTKCCTESLVNRRPCFSALEVDETYVPKEFNAGTFTFHADICTLSEKERQIKKQTALVELVKHKPKATKEQLKAAMDDFAAFVEKCCKADDKETCFAEEGKKLVAASQAALGL

SEQ ID NO: 303 - protein, 585 aa, Artificial Sequence
  Synthetic peptide
DAHKSEVAHRFKDLGEENFKALVLIAFAQYLQQCPFEDHVKLVNEVTEFAKTCVADESAENCDKSLHTLFGDKLCTVATLRETYGEMADCCAKQEPERNECFLQHKDDNPNLPRLVRPEVDVMCTAFHDNEETFLKKYLYEIARRHPYFYAPELLFFAKRYKAAFTECCQAADKAACLLPKLDELRDEGKASSAKQRLKCASLQKFGERAFKAWAVARLSQRFPKAEFAEVSKLVTDLTKVHTECCHGDLLECADDRADLAKYICENQDSISSKLKECCEKPLLEKSHCIAEVENDEMPADLPSLAADFVESKDVCKNYAEAKDVFLGMFLYEYARRHPDYSVVLLLRLAKTYETTLEKCCAAADPHECYAKVFDEFKPLVEEPQNLIKQNCELFEQLGEYKFQNALLVRYTKKVPQVSTPTLVEVSRNLGKVGSKCCKHPEAKRMPCAEDYLSVVLNQLCVLHEKTPVSDRVTKCCTESLVNRRPCFSALEVDETYVPKEFNAETFTFHADICTLSEKERQIKKQTALVELVKHKPKATKEQLKAVMDDFAAFVEKCCKADDKETCFAEEGPKLVAASQAALGL

SEQ ID NO: 304 - protein, 585 aa, Artificial Sequence
  Synthetic peptide
DAHKSEVAHRFKDLGEENFKALVLIAFAQYLQQCPFEDHVKLVNEVTEFAKTCVADESAENCDKSLHTLFGDKLCTVATLRETYGEMADCCAKQEPERNECFLQHKDDNPNLPRLVRPEVDVMCTAFHDNEETFLKKYLYEIARRHPYFYAPELLFFAKRYKAAFTECCQAADKAACLLPKLDELRDEGKASSAKQRLKCASLQKFGERAFKAWAVARLSQRFPKAEFAEVSKLVTDLTKVHTECCHGDLLECADDRADLAKYICENQDSISSKLKECCEKPLLEKSHCIAEVENDEMPADLPSLAADFVESKDVCKNYAEAKDVFLGMFLYEYARRHPDYSVVLLLRLAKTYETTLEKCCAAADPHECYAKVFDEFKPLVEEPQNLIKQNCELFEQLGEYKFQNALLVRYTKKVPQVSTPTLVEVSRNLGKVGSKCCKHPEAKRMPCAEDYLSVVLNQLCVLHEKTPVSDRVTKCCTESLVNRRPCFSALDVDETYVPKEFNAETFTFHADICTLSEKERQIKKQTALVELVKHKPKATKEQLKAVMDDFAAFVEKCCKADDKETCFAEEGPHLVAASKAALGL

SEQ ID NO: 305 - protein, 585 aa, Artificial Sequence
  Synthetic peptide
DAHKSEVAHRFKDLGEENFKALVLIAFAQYLQQCPFEDHVKLVNEVTEFAKTCVADESAENCDKSLHTLFGDKLCTVATLRETYGEMADCCAKQEPERNECFLQHKDDNPNLPRLVRPEVDVMCTAFHDNEETFLKKYLYEIARRHPYFYAPELLFFAKRYKAAFTECCQAADKAACLLPKLDELRDEGKASSAKQRLKCASLQKFGERAFKAWAVARLSQRFPKAEFAEVSKLVTDLTKVHTECCHGDLLECADDRADLAKYICENQDSISSKLKECCEKPLLEKSHCIAEVENDEMPADLPSLAADFVESKDVCKNYAEAKDVFLGMFLYEYARRHPDYSVVLLLRLAKTYETTLEKCCAAADPHECYAKVFDEFKPLVEEPQNLIKQNCELFEQLGEYKFQNALLVRYTKKVPQVSTPTLVEVSRNLGKVGSKCCKHPEAKRMPCAEDYLSVVLNQLCVLHEKTPVSDRVTKCCTESLVNRRPCFSALGVDETYVPKEFNAETFTFHADICTLSEKERQIKKQTALVELVKHKPKATKEQLKAVMDKFAAFVEKCCKADDKETCFAEEGPKLVAASQAALGL

SEQ ID NO: 306 - protein, 585 aa, Artificial Sequence
  Synthetic peptide
DAHKSEVAHRFKDLGEENFKALVLIAFAQYLQQCPFEDHVKLVNEVTEFAKTCVADESAENCDKSLHTLFGDKLCTVATLRETYGEMADCCAKQEPERNECFLQHKDDNPNLPRLVRPEVDVMCTAFHDNEETFLKKYLYEIARRHPYFYAPELLFFAKRYKAAFTECCQAADKAACLLPKLDELRDEGKASSAKQRLKCASLQKFGERAFKAWAVARLSQRFPKAEFAEVSKLVTDLTKVHTECCHGDLLECADDRADLAKYICENQDSISSKLKECCEKPLLEKSHCIAEVENDEMPADLPSLAADFVESKDVCKNYAEAKDVFLGMFLYEYARRHPDYSVVLLLRLAKTYETTLEKCCAAADPHECYAKVFDEFKPLVEEPQNLIKQNCELFEQLGEYKFQNALLVRYTKKVPQVSTPTLVEVSRNLGKVGSKCCKHPEAKRMPCAEDYLSVVLNQLCVLHEKTPVSDRVTKCCTESLVNRRPCFSALDVDETYVPKEFNAETFTFHADICTLSEKERQIKKQTALVELVKHKPKATKEQLKAVMDKFAAFVEKCCKADDKETCFAEEGPKLVAASQAALGL

SEQ ID NO: 307 - protein, 585 aa, Artificial Sequence
  Synthetic peptide
DAHKSEVAHRFKDLGEENFKALVLIAFAQYLQQCPFEDHVKLVNEVTEFAKTCVADESAENCDKSLHTLFGDKLCTVATLRETYGEMADCCAKQEPERNECFLQHKDDNPNLPRLVRPEVDVMCTAFHDNEETFLKKYLYEIARRHPYFYAPELLFFAKRYKAAFTECCQAADKAACLLPKLDELRDEGKASSAKQRLKCASLQKFGERAFKAWAVARLSQRFPKAEFAEVSKLVTDLTKVHTECCHGDLLECADDRADLAKYICENQDSISSKLKECCEKPLLEKSHCIAEVENDEMPADLPSLAADFVESKDVCKNYAEAKDVFLGMFLYEYARRHPDYSVVLLLRLAKTYETTLEKCCAAADPHECYAKVFDEFKPLVEEPQNLIKQNCELFEQLGEYKFQNALLVRYTKKVPQVSTPTLVEVSRNLGKVGSKCCKHPEAKRMPCAEDYLSVVLNQLCVLHEKTPVSDRVTKCCTESLVNRRPCFSALEVDETYVPKEFNAETFTFHADICTLSEKERQIKKQTALVELVKHKPKATKEQLKAVMDKFAAFVEKCCKADDKETCFAEEGPHLVAASQAALGL

SEQ ID NO: 308 - protein, 585 aa, Artificial Sequence
  Synthetic peptide
DAHKSEVAHRFKDLGEENFKALVLIAFAQYLQQCPFEDHVKLVNEVTEFAKTCVADESAENCDKSLHTLFGDKLCTVATLRETYGEMADCCAKQEPERNECFLQHKDDNPNLPRLVRPEVDVMCTAFHDNEETFLKKYLYEIARRHPYFYAPELLFFAKRYKAAFTECCQAADKAACLLPKLDELRDEGKASSAKQRLKCASLQKFGERAFKAWAVARLSQRFPKAEFAEVSKLVTDLTKVHTECCHGDLLECADDRADLAKYICENQDSISSKLKECCEKPLLEKSHCIAEVENDEMPADLPSLAADFVESKDVCKNYAEAKDVFLGMFLYEYARRHPDYSVVLLLRLAKTYETTLEKCCAAADPHECYAKVFDEFKPLVEEPQNLIKQNCELFEQLGEYKFQNALLVRYTKKVPQVSTPTLVEVSRNLGKVGSKCCKHPEAKRMPCAEDYLSVVLNQLCVLHEKTPVSDRVTKCCTESLVNRRPCFSALEVDETYVPKEFNAETFTFHADICTLSEKERQIKKQTALVELVKHKPKATKEQLKAVMDDFAAFVEKCCKADDKETCFAEEGPHLVAASKAALGL

SEQ ID NO: 309 - protein, 585 aa, Artificial Sequence
  Synthetic peptide
DAHKSEVAHRFKDLGEENFKALVLIAFAQYLQQCPFEDHVKLVNEVTEFAKTCVADESAENCDKSLHTLFGDKLCTVATLRETYGEMADCCAKQEPERNECFLQHKDDNPNLPRLVRPEVDVMCTAFHDNEETFLKKYLYEIARRHPYFYAPELLFFAKRYKAAFTECCQAADKAACLLPKLDELRDEGKASSAKQRLKCASLQKFGERAFKAWAVARLSQRFPKAEFAEVSKLVTDLTKVHTECCHGDLLECADDRADLAKYICENQDSISSKLKECCEKPLLEKSHCIAEVENDEMPADLPSLAADFVESKDVCKNYAEAKDVFLGMFLYEYARRHPDYSVVLLLRLAKTYETTLEKCCAAADPHECYAKVFDEFKPLVEEPQNLIKQNCELFEQLGEYKFQNALLVRYTKKVPQVSTPTLVEVSRNLGKVGSKCCKHPEAKRMPCAEDYLSVVLNQLCVLHEKTPVSDRVTKCCTESLVNRRPCFSALEVDETYVPKEFNAETFTFHADICTLSEKERQIKKQTALVELVKHKPKATKEQLKAVMDKFAAFVEKCCKADDKETCFAEEGPKLVAASKAALGL

SEQ ID NO: 310 - protein, 585 aa, Artificial Sequence
  Synthetic peptide
DAHKSEVAHRFKDLGEENFKALVLIAFAQYLQQCPFEDHVKLVNEVTEFAKTCVADESAENCDKSLHTLFGDKLCTVATLRETYGEMADCCAKQEPERNECFLQHKDDNPNLPRLVRPEVDVMCTAFHDNEETFLKKYLYEIARRHPYFYAPELLFFAKRYKAAFTECCQAADKAACLLPKLDELRDEGKASSAKQRLKCASLQKFGERAFKAWAVARLSQRFPKAEFAEVSKLVTDLTKVHTECCHGDLLECADDRADLAKYICENQDSISSKLKECCEKPLLEKSHCIAEVENDEMPADLPSLAADFVESKDVCKNYAEAKDVFLGMFLYEYARRHPDYSVVLLLRLAKTYETTLEKCCAAADPHECYAKVFDEFKPLVEEPQNLIKQNCELFEQLGEYKFQNALLVRYTKKVPQVSTPTLVEVSRNLGKVGSKCCKHPEAKRMPCAEDYLSVVLNQLCVLHEKTPVSDRVTKCCTESLVNRRPCFSALDVDETYVPKEFNAETFTFHADICTLSEKERQIKKQTALVELVKHKPKATKEQLKAVMDDFAAFVEKCCKADDKETCFAEEGPKLVAASKAALGL

SEQ ID NO: 311 - protein, 585 aa, Artificial Sequence
  Synthetic peptide
DAHKSEVAHRFKDLGEENFKALVLIAFAQYLQQSPFEDHVKLVNEVTEFAKTCVADESAENCDKSLHTLFGDKLCTVATLRETYGEMADCCAKQEPERNECFLQHKDDNPNLPRLVRPEVDVMCTAFHDNEETFLKKYLYEIARRHPYFYAPELLFFAKRYKAAFTECCQAADKAACLLPKLDELRDEGKASSAKQRLKCASLQKFGERAFKAWAVARLSQRFPKAEFAEVSKLVTDLTKVHTECCHGDLLECADDRADLAKYICENQDSISSKLKECCEKPLLEKSHCIAEVENDEMPADLPSLAADFVESKDVCKNYAEAKDVFLGMFLYEYARRHPDYSVVLLLRLAKTYETTLEKCCAAADPHECYAKVFDEFKPLVEEPQNLIKQNCELFEQLGEYKFQNALLVRYTKKVPQVSTPTLVEVSRNLGKVGSKCCKHPEAKRMPCAEDYLSVVLNQLCVLHEKTPVSDRVTKCCTESLVNRRPCFSALEVDETYVPKEFNAETFTFHADICTLSEKERQIKKQTALVELVKHKPKATKEQLKAVMDDFAAFVEKCCKADDKETCFAEEGKKLVAASQAALGL

SEQ ID NO: 312 - protein, 585 aa, Artificial Sequence
  Synthetic peptide
DAHKSEVAHRFKDLGEENFKALVLIAFAQYLQQSPFEDHVKLVNEVTEFAKTCVADESAENCDKSLHTLFGDKLCTVATLRETYGEMADCCAKQEPERNECFLQHKDDNPNLPRLVRPEVDVMCTAFHDNEETFLKKYLYEIARRHPYFYAPELLFFAKRYKAAFTECCQAADKAACLLPKLDELRDEGKASSAKQRLKCASLQKFGERAFKAWAVARLSQRFPKAEFAEVSKLVTDLTKVHTECCHGDLLECADDRADLAKYICENQDSISSKLKECCEKPLLEKSHCIAEVENDEMPADLPSLAADFVESKDVCKNYAEAKDVFLGMFLYEYARRHPDYSVVLLLRLAKTYETTLEKCCAAADPHECYAKVFDEFKPLVEEPQNLIKQNCELFEQLGEYKFQNALLVRYTKKVPQVSTPTLVEVSRNLGKVGSKCCKHPEAKRMPCAEDYLSVVLNQLCVLHEKTPVSDRVTKCCTESLVNRRPCFSALEVDETYVPKEFNAGTFTFHADICTLSEKERQIKKQTALVELVKHKPKATKEQLKAAMDDFAAFVEKCCKADDKETCFAEEGKKLVAASQAALGL

SEQ ID NO: 313 - protein, 585 aa, Artificial Sequence
  Synthetic peptide
DAHKSEVAHRFKDLGEENFKALVLIAFAQYLQQSPFEDHVKLVNEVTEFAKTCVADESAENCDKSLHTLFGDKLCTVATLRETYGEMADCCAKQEPERNECFLQHKDDNPNLPRLVRPEVDVMCTAFHDNEETFLKKYLYEIARRHPYFYAPELLFFAKRYKAAFTECCQAADKAACLLPKLDELRDEGKASSAKQRLKCASLQKFGERAFKAWAVARLSQRFPKAEFAEVSKLVTDLTKVHTECCHGDLLECADDRADLAKYICENQDSISSKLKECCEKPLLEKSHCIAEVENDEMPADLPSLAADFVESKDVCKNYAEAKDVFLGMFLYEYARRHPDYSVVLLLRLAKTYETTLEKCCAAADPHECYAKVFDEFKPLVEEPQNLIKQNCELFEQLGEYKFQNALLVRYTKKVPQVSTPTLVEVSRNLGKVGSKCCKHPEAKRMPCAEDYLSVVLNQLCVLHEKTPVSDRVTKCCTESLVNRRPCFSALEVDETYVPKEFNAETFTFHADICTLSEKERQIKKQTALVELVKHKPKATKEQLKAVMDDFAAFVEKCCKADDKETCFAEEGPKLVAASQAALGL

SEQ ID NO: 314 - protein, 585 aa, Artificial Sequence
  Synthetic peptide
DAHKSEVAHRFKDLGEENFKALVLIAFAQYLQQSPFEDHVKLVNEVTEFAKTCVADESAENCDKSLHTLFGDKLCTVATLRETYGEMADCCAKQEPERNECFLQHKDDNPNLPRLVRPEVDVMCTAFHDNEETFLKKYLYEIARRHPYFYAPELLFFAKRYKAAFTECCQAADKAACLLPKLDELRDEGKASSAKQRLKCASLQKFGERAFKAWAVARLSQRFPKAEFAEVSKLVTDLTKVHTECCHGDLLECADDRADLAKYICENQDSISSKLKECCEKPLLEKSHCIAEVENDEMPADLPSLAADFVESKDVCKNYAEAKDVFLGMFLYEYARRHPDYSVVLLLRLAKTYETTLEKCCAAADPHECYAKVFDEFKPLVEEPQNLIKQNCELFEQLGEYKFQNALLVRYTKKVPQVSTPTLVEVSRNLGKVGSKCCKHPEAKRMPCAEDYLSVVLNQLCVLHEKTPVSDRVTKCCTESLVNRRPCFSALDVDETYVPKEFNAETFTFHADICTLSEKERQIKKQTALVELVKHKPKATKEQLKAVMDDFAAFVEKCCKADDKETCFAEEGPHLVAASKAALGL

SEQ ID NO: 315 - protein, 585 aa, Artificial Sequence
  Synthetic peptide
DAHKSEVAHRFKDLGEENFKALVLIAFAQYLQQSPFEDHVKLVNEVTEFAKTCVADESAENCDKSLHTLFGDKLCTVATLRETYGEMADCCAKQEPERNECFLQHKDDNPNLPRLVRPEVDVMCTAFHDNEETFLKKYLYEIARRHPYFYAPELLFFAKRYKAAFTECCQAADKAACLLPKLDELRDEGKASSAKQRLKCASLQKFGERAFKAWAVARLSQRFPKAEFAEVSKLVTDLTKVHTECCHGDLLECADDRADLAKYICENQDSISSKLKECCEKPLLEKSHCIAEVENDEMPADLPSLAADFVESKDVCKNYAEAKDVFLGMFLYEYARRHPDYSVVLLLRLAKTYETTLEKCCAAADPHECYAKVFDEFKPLVEEPQNLIKQNCELFEQLGEYKFQNALLVRYTKKVPQVSTPTLVEVSRNLGKVGSKCCKHPEAKRMPCAEDYLSVVLNQLCVLHEKTPVSDRVTKCCTESLVNRRPCFSALGVDETYVPKEFNAETFTFHADICTLSEKERQIKKQTALVELVKHKPKATKEQLKAVMDKFAAFVEKCCKADDKETCFAEEGPKLVAASQAALGL

SEQ ID NO: 316 - protein, 585 aa, Artificial Sequence
  Synthetic peptide
DAHKSEVAHRFKDLGEENFKALVLIAFAQYLQQSPFEDHVKLVNEVTEFAKTCVADESAENCDKSLHTLFGDKLCTVATLRETYGEMADCCAKQEPERNECFLQHKDDNPNLPRLVRPEVDVMCTAFHDNEETFLKKYLYEIARRHPYFYAPELLFFAKRYKAAFTECCQAADKAACLLPKLDELRDEGKASSAKQRLKCASLQKFGERAFKAWAVARLSQRFPKAEFAEVSKLVTDLTKVHTECCHGDLLECADDRADLAKYICENQDSISSKLKECCEKPLLEKSHCIAEVENDEMPADLPSLAADFVESKDVCKNYAEAKDVFLGMFLYEYARRHPDYSVVLLLRLAKTYETTLEKCCAAADPHECYAKVFDEFKPLVEEPQNLIKQNCELFEQLGEYKFQNALLVRYTKKVPQVSTPTLVEVSRNLGKVGSKCCKHPEAKRMPCAEDYLSVVLNQLCVLHEKTPVSDRVTKCCTESLVNRRPCFSALDVDETYVPKEFNAETFTFHADICTLSEKERQIKKQTALVELVKHKPKATKEQLKAVMDKFAAFVEKCCKADDKETCFAEEGPKLVAASQAALGL

SEQ ID NO: 317 - protein, 585 aa, Artificial Sequence
  Synthetic peptide
DAHKSEVAHRFKDLGEENFKALVLIAFAQYLQQSPFEDHVKLVNEVTEFAKTCVADESAENCDKSLHTLFGDKLCTVATLRETYGEMADCCAKQEPERNECFLQHKDDNPNLPRLVRPEVDVMCTAFHDNEETFLKKYLYEIARRHPYFYAPELLFFAKRYKAAFTECCQAADKAACLLPKLDELRDEGKASSAKQRLKCASLQKFGERAFKAWAVARLSQRFPKAEFAEVSKLVTDLTKVHTECCHGDLLECADDRADLAKYICENQDSISSKLKECCEKPLLEKSHCIAEVENDEMPADLPSLAADFVESKDVCKNYAEAKDVFLGMFLYEYARRHPDYSVVLLLRLAKTYETTLEKCCAAADPHECYAKVFDEFKPLVEEPQNLIKQNCELFEQLGEYKFQNALLVRYTKKVPQVSTPTLVEVSRNLGKVGSKCCKHPEAKRMPCAEDYLSVVLNQLCVLHEKTPVSDRVTKCCTESLVNRRPCFSALEVDETYVPKEFNAETFTFHADICTLSEKERQIKKQTALVELVKHKPKATKEQLKAVMDKFAAFVEKCCKADDKETCFAEEGPHLVAASQAALGL

SEQ ID NO: 318 - protein, 585 aa, Artificial Sequence
  Synthetic peptide
DAHKSEVAHRFKDLGEENFKALVLIAFAQYLQQSPFEDHVKLVNEVTEFAKTCVADESAENCDKSLHTLFGDKLCTVATLRETYGEMADCCAKQEPERNECFLQHKDDNPNLPRLVRPEVDVMCTAFHDNEETFLKKYLYEIARRHPYFYAPELLFFAKRYKAAFTECCQAADKAACLLPKLDELRDEGKASSAKQRLKCASLQKFGERAFKAWAVARLSQRFPKAEFAEVSKLVTDLTKVHTECCHGDLLECADDRADLAKYICENQDSISSKLKECCEKPLLEKSHCIAEVENDEMPADLPSLAADFVESKDVCKNYAEAKDVFLGMFLYEYARRHPDYSVVLLLRLAKTYETTLEKCCAAADPHECYAKVFDEFKPLVEEPQNLIKQNCELFEQLGEYKFQNALLVRYTKKVPQVSTPTLVEVSRNLGKVGSKCCKHPEAKRMPCAEDYLSVVLNQLCVLHEKTPVSDRVTKCCTESLVNRRPCFSALEVDETYVPKEFNAETFTFHADICTLSEKERQIKKQTALVELVKHKPKATKEQLKAVMDDFAAFVEKCCKADDKETCFAEEGPHLVAASKAALGL

SEQ ID NO: 319 - protein, 585 aa, Artificial Sequence
  Synthetic peptide
DAHKSEVAHRFKDLGEENFKALVLIAFAQYLQQSPFEDHVKLVNEVTEFAKTCVADESAENCDKSLHTLFGDKLCTVATLRETYGEMADCCAKQEPERNECFLQHKDDNPNLPRLVRPEVDVMCTAFHDNEETFLKKYLYEIARRHPYFYAPELLFFAKRYKAAFTECCQAADKAACLLPKLDELRDEGKASSAKQRLKCASLQKFGERAFKAWAVARLSQRFPKAEFAEVSKLVTDLTKVHTECCHGDLLECADDRADLAKYICENQDSISSKLKECCEKPLLEKSHCIAEVENDEMPADLPSLAADFVESKDVCKNYAEAKDVFLGMFLYEYARRHPDYSVVLLLRLAKTYETTLEKCCAAADPHECYAKVFDEFKPLVEEPQNLIKQNCELFEQLGEYKFQNALLVRYTKKVPQVSTPTLVEVSRNLGKVGSKCCKHPEAKRMPCAEDYLSVVLNQLCVLHEKTPVSDRVTKCCTESLVNRRPCFSALEVDETYVPKEFNAETFTFHADICTLSEKERQIKKQTALVELVKHKPKATKEQLKAVMDKFAAFVEKCCKADDKETCFAEEGPKLVAASKAALGL

SEQ ID NO: 320 - protein, 585 aa, Artificial Sequence
  Synthetic peptide
DAHKSEVAHRFKDLGEENFKALVLIAFAQYLQQSPFEDHVKLVNEVTEFAKTCVADESAENCDKSLHTLFGDKLCTVATLRETYGEMADCCAKQEPERNECFLQHKDDNPNLPRLVRPEVDVMCTAFHDNEETFLKKYLYEIARRHPYFYAPELLFFAKRYKAAFTECCQAADKAACLLPKLDELRDEGKASSAKQRLKCASLQKFGERAFKAWAVARLSQRFPKAEFAEVSKLVTDLTKVHTECCHGDLLECADDRADLAKYICENQDSISSKLKECCEKPLLEKSHCIAEVENDEMPADLPSLAADFVESKDVCKNYAEAKDVFLGMFLYEYARRHPDYSVVLLLRLAKTYETTLEKCCAAADPHECYAKVFDEFKPLVEEPQNLIKQNCELFEQLGEYKFQNALLVRYTKKVPQVSTPTLVEVSRNLGKVGSKCCKHPEAKRMPCAEDYLSVVLNQLCVLHEKTPVSDRVTKCCTESLVNRRPCFSALDVDETYVPKEFNAETFTFHADICTLSEKERQIKKQTALVELVKHKPKATKEQLKAVMDDFAAFVEKCCKADDKETCFAEEGPKLVAASKAALGL

SEQ ID NO: 321 - protein, 585 aa, Artificial Sequence
  Synthetic peptide
DAHKSEVAHRFKDLGEENFKALVLIAFAQYLQQAPFEDHVKLVNEVTEFAKTCVADESAENCDKSLHTLFGDKLCTVATLRETYGEMADCCAKQEPERNECFLQHKDDNPNLPRLVRPEVDVMCTAFHDNEETFLKKYLYEIARRHPYFYAPELLFFAKRYKAAFTECCQAADKAACLLPKLDELRDEGKASSAKQRLKCASLQKFGERAFKAWAVARLSQRFPKAEFAEVSKLVTDLTKVHTECCHGDLLECADDRADLAKYICENQDSISSKLKECCEKPLLEKSHCIAEVENDEMPADLPSLAADFVESKDVCKNYAEAKDVFLGMFLYEYARRHPDYSVVLLLRLAKTYETTLEKCCAAADPHECYAKVFDEFKPLVEEPQNLIKQNCELFEQLGEYKFQNALLVRYTKKVPQVSTPTLVEVSRNLGKVGSKCCKHPEAKRMPCAEDYLSVVLNQLCVLHEKTPVSDRVTKCCTESLVNRRPCFSALEVDETYVPKEFNAETFTFHADICTLSEKERQIKKQTALVELVKHKPKATKEQLKAVMDDFAAFVEKCCKADDKETCFAEEGKKLVAASQAALGL

SEQ ID NO: 322 - protein, 585 aa, Artificial Sequence
  Synthetic peptide
DAHKSEVAHRFKDLGEENFKALVLIAFAQYLQQAPFEDHVKLVNEVTEFAKTCVADESAENCDKSLHTLFGDKLCTVATLRETYGEMADCCAKQEPERNECFLQHKDDNPNLPRLVRPEVDVMCTAFHDNEETFLKKYLYEIARRHPYFYAPELLFFAKRYKAAFTECCQAADKAACLLPKLDELRDEGKASSAKQRLKCASLQKFGERAFKAWAVARLSQRFPKAEFAEVSKLVTDLTKVHTECCHGDLLECADDRADLAKYICENQDSISSKLKECCEKPLLEKSHCIAEVENDEMPADLPSLAADFVESKDVCKNYAEAKDVFLGMFLYEYARRHPDYSVVLLLRLAKTYETTLEKCCAAADPHECYAKVFDEFKPLVEEPQNLIKQNCELFEQLGEYKFQNALLVRYTKKVPQVSTPTLVEVSRNLGKVGSKCCKHPEAKRMPCAEDYLSVVLNQLCVLHEKTPVSDRVTKCCTESLVNRRPCFSALEVDETYVPKEFNAGTFTFHADICTLSEKERQIKKQTALVELVKHKPKATKEQLKAAMDDFAAFVEKCCKADDKETCFAEEGKKLVAASQAALGL

SEQ ID NO: 323 - protein, 585 aa, Artificial Sequence
  Synthetic peptide
DAHKSEVAHRFKDLGEENFKALVLIAFAQYLQQAPFEDHVKLVNEVTEFAKTCVADESAENCDKSLHTLFGDKLCTVATLRETYGEMADCCAKQEPERNECFLQHKDDNPNLPRLVRPEVDVMCTAFHDNEETFLKKYLYEIARRHPYFYAPELLFFAKRYKAAFTECCQAADKAACLLPKLDELRDEGKASSAKQRLKCASLQKFGERAFKAWAVARLSQRFPKAEFAEVSKLVTDLTKVHTECCHGDLLECADDRADLAKYICENQDSISSKLKECCEKPLLEKSHCIAEVENDEMPADLPSLAADFVESKDVCKNYAEAKDVFLGMFLYEYARRHPDYSVVLLLRLAKTYETTLEKCCAAADPHECYAKVFDEFKPLVEEPQNLIKQNCELFEQLGEYKFQNALLVRYTKKVPQVSTPTLVEVSRNLGKVGSKCCKHPEAKRMPCAEDYLSVVLNQLCVLHEKTPVSDRVTKCCTESLVNRRPCFSALEVDETYVPKEFNAETFTFHADICTLSEKERQIKKQTALVELVKHKPKATKEQLKAVMDDFAAFVEKCCKADDKETCFAEEGPKLVAASQAALGL

SEQ ID NO: 324 - protein, 585 aa, Artificial Sequence
  Synthetic peptide
DAHKSEVAHRFKDLGEENFKALVLIAFAQYLQQAPFEDHVKLVNEVTEFAKTCVADESAENCDKSLHTLFGDKLCTVATLRETYGEMADCCAKQEPERNECFLQHKDDNPNLPRLVRPEVDVMCTAFHDNEETFLKKYLYEIARRHPYFYAPELLFFAKRYKAAFTECCQAADKAACLLPKLDELRDEGKASSAKQRLKCASLQKFGERAFKAWAVARLSQRFPKAEFAEVSKLVTDLTKVHTECCHGDLLECADDRADLAKYICENQDSISSKLKECCEKPLLEKSHCIAEVENDEMPADLPSLAADFVESKDVCKNYAEAKDVFLGMFLYEYARRHPDYSVVLLLRLAKTYETTLEKCCAAADPHECYAKVFDEFKPLVEEPQNLIKQNCELFEQLGEYKFQNALLVRYTKKVPQVSTPTLVEVSRNLGKVGSKCCKHPEAKRMPCAEDYLSVVLNQLCVLHEKTPVSDRVTKCCTESLVNRRPCFSALDVDETYVPKEFNAETFTFHADICTLSEKERQIKKQTALVELVKHKPKATKEQLKAVMDDFAAFVEKCCKADDKETCFAEEGPHLVAASKAALGL

SEQ ID NO: 325 - protein, 585 aa, Artificial Sequence
  Synthetic peptide
DAHKSEVAHRFKDLGEENFKALVLIAFAQYLQQAPFEDHVKLVNEVTEFAKTCVADESAENCDKSLHTLFGDKLCTVATLRETYGEMADCCAKQEPERNECFLQHKDDNPNLPRLVRPEVDVMCTAFHDNEETFLKKYLYEIARRHPYFYAPELLFFAKRYKAAFTECCQAADKAACLLPKLDELRDEGKASSAKQRLKCASLQKFGERAFKAWAVARLSQRFPKAEFAEVSKLVTDLTKVHTECCHGDLLECADDRADLAKYICENQDSISSKLKECCEKPLLEKSHCIAEVENDEMPADLPSLAADFVESKDVCKNYAEAKDVFLGMFLYEYARRHPDYSVVLLLRLAKTYETTLEKCCAAADPHECYAKVFDEFKPLVEEPQNLIKQNCELFEQLGEYKFQNALLVRYTKKVPQVSTPTLVEVSRNLGKVGSKCCKHPEAKRMPCAEDYLSVVLNQLCVLHEKTPVSDRVTKCCTESLVNRRPCFSALGVDETYVPKEFNAETFTFHADICTLSEKERQIKKQTALVELVKHKPKATKEQLKAVMDKFAAFVEKCCKADDKETCFAEEGPKLVAASQAALGL

SEQ ID NO: 326 - protein, 585 aa, Artificial Sequence
  Synthetic peptide
DAHKSEVAHRFKDLGEENFKALVLIAFAQYLQQAPFEDHVKLVNEVTEFAKTCVADESAENCDKSLHTLFGDKLCTVATLRETYGEMADCCAKQEPERNECFLQHKDDNPNLPRLVRPEVDVMCTAFHDNEETFLKKYLYEIARRHPYFYAPELLFFAKRYKAAFTECCQAADKAACLLPKLDELRDEGKASSAKQRLKCASLQKFGERAFKAWAVARLSQRFPKAEFAEVSKLVTDLTKVHTECCHGDLLECADDRADLAKYICENQDSISSKLKECCEKPLLEKSHCIAEVENDEMPADLPSLAADFVESKDVCKNYAEAKDVFLGMFLYEYARRHPDYSVVLLLRLAKTYETTLEKCCAAADPHECYAKVFDEFKPLVEEPQNLIKQNCELFEQLGEYKFQNALLVRYTKKVPQVSTPTLVEVSRNLGKVGSKCCKHPEAKRMPCAEDYLSVVLNQLCVLHEKTPVSDRVTKCCTESLVNRRPCFSALDVDETYVPKEFNAETFTFHADICTLSEKERQIKKQTALVELVKHKPKATKEQLKAVMDKFAAFVEKCCKADDKETCFAEEGPKLVAASQAALGL

SEQ ID NO: 327 - protein, 585 aa, Artificial Sequence
  Synthetic peptide
DAHKSEVAHRFKDLGEENFKALVLIAFAQYLQQAPFEDHVKLVNEVTEFAKTCVADESAENCDKSLHTLFGDKLCTVATLRETYGEMADCCAKQEPERNECFLQHKDDNPNLPRLVRPEVDVMCTAFHDNEETFLKKYLYEIARRHPYFYAPELLFFAKRYKAAFTECCQAADKAACLLPKLDELRDEGKASSAKQRLKCASLQKFGERAFKAWAVARLSQRFPKAEFAEVSKLVTDLTKVHTECCHGDLLECADDRADLAKYICENQDSISSKLKECCEKPLLEKSHCIAEVENDEMPADLPSLAADFVESKDVCKNYAEAKDVFLGMFLYEYARRHPDYSVVLLLRLAKTYETTLEKCCAAADPHECYAKVFDEFKPLVEEPQNLIKQNCELFEQLGEYKFQNALLVRYTKKVPQVSTPTLVEVSRNLGKVGSKCCKHPEAKRMPCAEDYLSVVLNQLCVLHEKTPVSDRVTKCCTESLVNRRPCFSALEVDETYVPKEFNAETFTFHADICTLSEKERQIKKQTALVELVKHKPKATKEQLKAVMDKFAAFVEKCCKADDKETCFAEEGPHLVAASQAALGL

SEQ ID NO: 328 - protein, 585 aa, Artificial Sequence
  Synthetic peptide
DAHKSEVAHRFKDLGEENFKALVLIAFAQYLQQAPFEDHVKLVNEVTEFAKTCVADESAENCDKSLHTLFGDKLCTVATLRETYGEMADCCAKQEPERNECFLQHKDDNPNLPRLVRPEVDVMCTAFHDNEETFLKKYLYEIARRHPYFYAPELLFFAKRYKAAFTECCQAADKAACLLPKLDELRDEGKASSAKQRLKCASLQKFGERAFKAWAVARLSQRFPKAEFAEVSKLVTDLTKVHTECCHGDLLECADDRADLAKYICENQDSISSKLKECCEKPLLEKSHCIAEVENDEMPADLPSLAADFVESKDVCKNYAEAKDVFLGMFLYEYARRHPDYSVVLLLRLAKTYETTLEKCCAAADPHECYAKVFDEFKPLVEEPQNLIKQNCELFEQLGEYKFQNALLVRYTKKVPQVSTPTLVEVSRNLGKVGSKCCKHPEAKRMPCAEDYLSVVLNQLCVLHEKTPVSDRVTKCCTESLVNRRPCFSALEVDETYVPKEFNAETFTFHADICTLSEKERQIKKQTALVELVKHKPKATKEQLKAVMDDFAAFVEKCCKADDKETCFAEEGPHLVAASKAALGL

SEQ ID NO: 329 - protein, 585 aa, Artificial Sequence
  Synthetic peptide
DAHKSEVAHRFKDLGEENFKALVLIAFAQYLQQAPFEDHVKLVNEVTEFAKTCVADESAENCDKSLHTLFGDKLCTVATLRETYGEMADCCAKQEPERNECFLQHKDDNPNLPRLVRPEVDVMCTAFHDNEETFLKKYLYEIARRHPYFYAPELLFFAKRYKAAFTECCQAADKAACLLPKLDELRDEGKASSAKQRLKCASLQKFGERAFKAWAVARLSQRFPKAEFAEVSKLVTDLTKVHTECCHGDLLECADDRADLAKYICENQDSISSKLKECCEKPLLEKSHCIAEVENDEMPADLPSLAADFVESKDVCKNYAEAKDVFLGMFLYEYARRHPDYSVVLLLRLAKTYETTLEKCCAAADPHECYAKVFDEFKPLVEEPQNLIKQNCELFEQLGEYKFQNALLVRYTKKVPQVSTPTLVEVSRNLGKVGSKCCKHPEAKRMPCAEDYLSVVLNQLCVLHEKTPVSDRVTKCCTESLVNRRPCFSALEVDETYVPKEFNAETFTFHADICTLSEKERQIKKQTALVELVKHKPKATKEQLKAVMDKFAAFVEKCCKADDKETCFAEEGPKLVAASKAALGL

SEQ ID NO: 330 - protein, 585 aa, Artificial Sequence
  Synthetic peptide
DAHKSEVAHRFKDLGEENFKALVLIAFAQYLQQAPFEDHVKLVNEVTEFAKTCVADESAENCDKSLHTLFGDKLCTVATLRETYGEMADCCAKQEPERNECFLQHKDDNPNLPRLVRPEVDVMCTAFHDNEETFLKKYLYEIARRHPYFYAPELLFFAKRYKAAFTECCQAADKAACLLPKLDELRDEGKASSAKQRLKCASLQKFGERAFKAWAVARLSQRFPKAEFAEVSKLVTDLTKVHTECCHGDLLECADDRADLAKYICENQDSISSKLKECCEKPLLEKSHCIAEVENDEMPADLPSLAADFVESKDVCKNYAEAKDVFLGMFLYEYARRHPDYSVVLLLRLAKTYETTLEKCCAAADPHECYAKVFDEFKPLVEEPQNLIKQNCELFEQLGEYKFQNALLVRYTKKVPQVSTPTLVEVSRNLGKVGSKCCKHPEAKRMPCAEDYLSVVLNQLCVLHEKTPVSDRVTKCCTESLVNRRPCFSALDVDETYVPKEFNAETFTFHADICTLSEKERQIKKQTALVELVKHKPKATKEQLKAVMDDFAAFVEKCCKADDKETCFAEEGPKLVAASKAALGL

SEQ ID NO: 331 - protein, 330 aa, Artificial Sequence
  Synthetic peptide
ASTKGPSVFPLAPSSKSTSGGTAALGCLVKDYFPEPVTVSWNSGALTSGVHTFPAVLQSSGLYSLSSVVTVPSSSLGTQTYICNVNHKPSNTKVDKKVEPKSCDKTHTCPPCPAPELLGGPSVFLFPPKPKDTLMISRTPEVTCVVVDVSHEDPEVKFNWYVDGVEVHNAKTKPCEEQYGSTYRCVSVLTVLHQDWLNGKEYKCKVSNKALPAPIEKTISKAKGQPREPQVYTLPPSREEMTKNQVSLTCLVKGFYPSDIAVEWESNGQPENNYDTTPPVLDSDGSFFLYSDLTVDKSRWQQGNVFSCSVMHEALHNHYTQKSLSLSPGK

SEQ ID NO: 332 - protein, 333 aa, Artificial Sequence
  Synthetic peptide
GQPKAAPSVTLFPPSSEELQANKATLVCLISDFYPGAVTVAWKADSSPVKAGVETTTPSKQSNNKYAASSYLSLTPEQWKSHRSYSCQVTHEGSTVEKTVAPTECSDKTHTCPPCPAPELLGGPSVFLFPPKPKDTLMISRTPEVTCVVVDVSHEDPEVKFNWYVDGVEVHNAKTKPCEEQYGSTYRCVSVLTVLHQDWLNGKEYKCKVSNKALPAPIEKTISKAKGQPREPQVYTLPPSRKEMTKNQVSLTCLVKGFYPSDIAVEWESNGQPENNYKTTPPVLKSDGSFFLYSKLTVDKSRWQQGNVFSCSVMHEALHNHYTQKSLSLSPGK

SEQ ID NO: 333 - protein, 330 aa, Artificial Sequence
  Synthetic peptide
ASTKGPSVFPLAPCSRSTSESTAALGCLVKDYFPEPVTVSWNSGALTSGVHTFPAVLQSSGLYSLSSVVTVPSSNFGTQTYTCNVDHKPSNTKVDKTVEPKSSDKTHTCPPCPAPEAAGGPSVFLFPPKPKDTLMISRTPEVTCVVVDVSHEDPEVKFNWYVDGVEVHNAKTKPREEQYNSTYRVVSVLTVLHQDWLNGKEYKCKVSNKALPAPIEKTISKAKGQPREPQVYTLPPSREEMTKNQVSLTCLVKGFYPSDIAVEWESNGQPENNYDTTPPVLDSDGSFFLYSDLTVDKSRWQQGNVFSCSVMHEALHNHYTQKSLSLSPGK

SEQ ID NO: 334 - protein, 338 aa, Artificial Sequence
  Synthetic peptide
GQPKAAPSVTLFPPSSEELQANKATLVCLISDFYPGAVTVAWKADSSPVKAGVETTTPSKQSNNKYAASSYLSLTPEQWKSHRSYSCQVTHEGSTVEKTVAPTECSEPKSSDKTHTCPPCPAPEAAGGPSVFLFPPKPKDTLMISRTPEVTCVVVDVSHEDPEVKFNWYVDGVEVHNAKTKPREEQYNSTYRVVSVLTVLHQDWLNGKEYKCKVSNKALPAPIEKTISKAKGQPREPQVYTLPPSRKEMTKNQVSLTCLVKGFYPSDIAVEWESNGQPENNYKTTPPVLKSDGSFFLYSKLTVDKSRWQQGNVFSCSVMHEALHNHYTQKSLSLSPGK

SEQ ID NO: 335 - protein, 227 aa, Artificial Sequence
  Synthetic peptide
DKTHTCPPCPAPELLGGPSVFLFPPKPKDTLMISRTPEVTCVVVDVSHEDPEVKFNWYVDGVEVHNAKTKPCEEQYGSTYRCVSVLTVLHQDWLNGKEYKCKVSNKALPAPIEKTISKAKGQPREPQVYTLPPSRKEMTKNQVSLTCLVKGFYPSDIAVEWESNGQPENNYKTTPPVLKSDGSFFLYSKLTVDKSRWQQGNVFSCSVMHEALHNHYTQKSLSLSPGK

SEQ ID NO: 336 - protein, 227 aa, Artificial Sequence
  Synthetic peptide
DKTHTCPPCPAPELLGGPSVFLFPPKPKDTLMISRTPEVTCVVVDVSHEDPEVKFNWYVDGVEVHNAKTKPCEEQYGSTYRCVSVLTVLHQDWLNGKEYKCKVSNKALPAPIEKTISKAKGQPREPQVYTLPPSREEMTKNQVSLTCLVKGFYPSDIAVEWESNGQPENNYDTTPPVLDSDGSFFLYSDLTVDKSRWQQGNVFSCSVMHEALHNHYTQKSLSLSPGK

SEQ ID NO: 337 - protein, 232 aa, Artificial Sequence
  Synthetic peptide
EPKSSDKTHTCPPCPAPELLGGPSVFLFPPKPKDTLMISRTPEVTCVVVDVSHEDPEVKFNWYVDGVEVHNAKTKPCEEQYGSTYRCVSVLTVLHQDWLNGKEYKCKVSNKALPAPIEKTISKAKGQPREPQVYTLPPSRKEMTKNQVSLTCLVKGFYPSDIAVEWESNGQPENNYKTTPPVLKSDGSFFLYSKLTVDKSRWQQGNVFSCSVMHEALHNHYTQKSLSLSPGK

SEQ ID NO: 338 - protein, 232 aa, Artificial Sequence
  Synthetic peptide
EPKSSDKTHTCPPCPAPELLGGPSVFLFPPKPKDTLMISRTPEVTCVVVDVSHEDPEVKFNWYVDGVEVHNAKTKPCEEQYGSTYRCVSVLTVLHQDWLNGKEYKCKVSNKALPAPIEKTISKAKGQPREPQVYTLPPSREEMTKNQVSLTCLVKGFYPSDIAVEWESNGQPENNYDTTPPVLDSDGSFFLYSDLTVDKSRWQQGNVFSCSVMHEALHNHYTQKSLSLSPGK

SEQ ID NO: 339 - protein, 232 aa, Artificial Sequence
  Synthetic peptide
EPKSSDKTHTCPPCPAPEAAGGPSVFLFPPKPKDTLMISRTPEVTCVVVDVSHEDPEVKFNWYVDGVEVHNAKTKPREEQYNSTYRVVSVLTVLHQDWLNGKEYKCKVSNKALPAPIEKTISKAKGQPREPQVYTLPPSRKEMTKNQVSLTCLVKGFYPSDIAVEWESNGQPENNYKTTPPVLKSDGSFFLYSKLTVDKSRWQQGNVFSCSVMHEALHNHYTQKSLSLSPGK

SEQ ID NO: 340 - protein, 232 aa, Artificial Sequence
  Synthetic peptide
EPKSSDKTHTCPPCPAPEAAGGPSVFLFPPKPKDTLMISRTPEVTCVVVDVSHEDPEVKFNWYVDGVEVHNAKTKPREEQYNSTYRVVSVLTVLHQDWLNGKEYKCKVSNKALPAPIEKTISKAKGQPREPQVYTLPPSREEMTKNQVSLTCLVKGFYPSDIAVEWESNGQPENNYDTTPPVLDSDGSFFLYSDLTVDKSRWQQGNVFSCSVMHEALHNHYTQKSLSLSPGK

SEQ ID NO: 341 - protein, 217 aa, Artificial Sequence
  Synthetic peptide
APELLGGPSVFLFPPKPKDTLMISRTPEVTCVVVDVSHEDPEVKFNWYVDGVEVHNAKTKPREEQYNSTYRVVSVLTVLHQDWLNGKEYKCKVSNKALPAPIEKTISKAKGQPREPQVTTLPPSREEMTKNQVSLTCLVKGFYPSDIAVEWESNGQPENNYDTTPPVLDSDGSFFLYSDLTVDKSRWQQGNVFSCSVMHEALHNHYTQKSLSLSPGK

SEQ ID NO: 342 - protein, 14 aa, Artificial Sequence
  Synthetic peptide
GSSTGAVTSGYYPN

SEQ ID NO: 343 - protein, 7 aa, Artificial Sequence
  Synthetic peptide
GTKFLAP

SEQ ID NO: 344 - protein, 9 aa, Artificial Sequence
  Synthetic peptide
ALWYSNRWV

SEQ ID NO: 345 - protein, 5 aa, Artificial Sequence
  Synthetic peptide
IYAMN

SEQ ID NO: 346 - protein, 19 aa, Artificial Sequence
  Synthetic peptide
RIRSKYNNYATYYADSVKS

SEQ ID NO: 347 - protein, 14 aa, Artificial Sequence
  Synthetic peptide
HGNFGNSYVSFFAY

SEQ ID NO: 348 - protein, 125 aa, Artificial Sequence
  Synthetic peptide
EVQLVESGGGLVQPGGSLKLSCAASGFTFNIYAMNWVRQAPGKGLEWVARIRSKYNNYATYYADSVKSRFTISRDDSKNTAYLQMNNLKTEDTAVYYCVRHGNFGNSYVSFFAYWGQGTLVTVSS

SEQ ID NO: 349 - protein, 109 aa, Artificial Sequence
  Synthetic peptide
QTVVTQEPSLTVSPGGTVTLTCGSSTGAVTSGYYPNWVQQKPGQAPRGLIGGTKFLAPGTPARFSGSLLGGKAALTLSGVQPEDEAEYYCALWYSNRWVFGGGTKLTVL

SEQ ID NO: 350 - protein, 249 aa, Artificial Sequence
  Synthetic peptide
EVQLVESGGGLVQPGGSLKLSCAASGFTFNIYAMNWVRQAPGKGLEWVARIRSKYNNYATYYADSVKSRFTISRDDSKNTAYLQMNNLKTEDTAVYYCVRHGNFGNSYVSFFAYWGQGTLVTVSSGGGGSGGGGSGGGGSQTVVTQEPSLTVSPGGTVTLTCGSSTGAVTSGYYPNWVQQKPGQAPRGLIGGTKFLAPGTPARFSGSLLGGKAALTLSGVQPEDEAEYYCALWYSNRWVFGGGTKLTVL

SEQ ID NO: 351 - protein, 14 aa, Artificial Sequence
  Synthetic peptide
GSSTGAVTSGYYPN

SEQ ID NO: 352 - protein, 7 aa, Artificial Sequence
  Synthetic peptide
GTKFLAP

SEQ ID NO: 353 - protein, 9 aa, Artificial Sequence
  Synthetic peptide
ALWYSNRWV

SEQ ID NO: 354 - protein, 5 aa, Artificial Sequence
  Synthetic peptide
KYAMN

SEQ ID NO: 355 - protein, 19 aa, Artificial Sequence
  Synthetic peptide
RIRSKYNNYATYYADSVKD

SEQ ID NO: 356 - protein, 14 aa, Artificial Sequence
  Synthetic peptide
HGNFGNSYISYWAY

SEQ ID NO: 357 - protein, 125 aa, Artificial Sequence
  Synthetic peptide
EVQLVESGGGLVQPGGSLKLSCAASGFTFNKYAMNWVRQAPGKGLEWVARIRSKYNNYATYYADSVKDRFTISRDDSKNTAYLQMNNLKTEDTAVYYCVRHGNFGNSYISYWAYWGQGTLVTVSS

SEQ ID NO: 358 - protein, 109 aa, Artificial Sequence; identical to SEQ ID NO: 349
  Synthetic peptide

SEQ ID NO: 359 - protein, 249 aa, Artificial Sequence
  Synthetic peptide
EVQLVESGGGLVQPGGSLKLSCAASGFTFNKYAMNWVRQAPGKGLEWVARIRSKYNNYATYYADSVKDRFTISRDDSKNTAYLQMNNLKTEDTAVYYCVRHGNFGNSYISYWAYWGQGTLVTVSSGGGGSGGGGSGGGGSQTVVTQEPSLTVSPGGTVTLTCGSSTGAVTSGYYPNWVQQKPGQAPRGLIGGTKFLAPGTPARFSGSLLGGKAALTLSGVQPEDEAEYYCALWYSNRWVFGGGTKLTVL

SEQ ID NO: 360 - protein, 14 aa, Artificial Sequence
  Synthetic peptide
GSSTGAVTSGYYPN

SEQ ID NO: 361 - protein, 7 aa, Artificial Sequence
  Synthetic peptide
GTKFLAP

SEQ ID NO: 362 - protein, 9 aa, Artificial Sequence
  Synthetic peptide
ALWYSNRWV

SEQ ID NO: 363 - protein, 5 aa, Artificial Sequence
  Synthetic peptide
SYAMN

SEQ ID NO: 364 - protein, 19 aa, Artificial Sequence
  Synthetic peptide
RIRSKYNNYATYYADSVKG

SEQ ID NO: 365 - protein, 14 aa, Artificial Sequence
  Synthetic peptide
HGNFGNSYLSFWAY

SEQ ID NO: 366 - protein, 125 aa, Artificial Sequence
  Synthetic peptide
EVQLVESGGGLEQPGGSLKLSCAASGFTFNSYAMNWVRQAPGKGLEWVARIRSKYNNYATYYADSVKGRFTISRDDSKNTAYLQMNNLKTEDTAVYYCVRHGNFGNSYLSFWAYWGQGTLVTVSS

SEQ ID NO: 367 - protein, 109 aa, Artificial Sequence; identical to SEQ ID NO: 349
  Synthetic peptide

SEQ ID NO: 368 - protein, 249 aa, Artificial Sequence
  Synthetic peptide
EVQLVESGGGLEQPGGSLKLSCAASGFTFNSYAMNWVRQAPGKGLEWVARIRSKYNNYATYYADSVKGRFTISRDDSKNTAYLQMNNLKTEDTAVYYCVRHGNFGNSYLSFWAYWGQGTLVTVSSGGGGSGGGGSGGGGSQTVVTQEPSLTVSPGGTVTLTCGSSTGAVTSGYYPNWVQQKPGQAPRGLIGGTKFLAPGTPARFSGSLLGGKAALTLSGVQPEDEAEYYCALWYSNRWVFGGGTKLTVL

SEQ ID NO: 369 - protein, 14 aa, Artificial Sequence
  Synthetic peptide
GSSTGAVTSGYYPN

SEQ ID NO: 370 - protein, 7 aa, Artificial Sequence
  Synthetic peptide
GTKFLAP

SEQ ID NO: 371 - protein, 9 aa, Artificial Sequence
  Synthetic peptide
ALWYSNRWV

SEQ ID NO: 372 - protein, 5 aa, Artificial Sequence
  Synthetic peptide
RYAMN

SEQ ID NO: 373 - protein, 19 aa, Artificial Sequence
  Synthetic peptide
RIRSKYNNYATYYADSVKG

SEQ ID NO: 374 - protein, 14 aa, Artificial Sequence
  Synthetic peptide
HGNFGNSYLSYFAY

SEQ ID NO: 375 - protein, 125 aa, Artificial Sequence
  Synthetic peptide
EVQLVESGGGLVQPGGSLKLSCAASGFTFNRYAMNWVRQAPGKGLEWVARIRSKYNNYATYYADSVKGRFTISRDDSKNTAYLQMNNLKTEDTAVYYCVRHGNFGNSYLSYFAYWGQGTLVTVSS

SEQ ID NO: 376 - protein, 109 aa, Artificial Sequence; identical to SEQ ID NO: 349
  Synthetic peptide

SEQ ID NO: 377 - protein, 249 aa, Artificial Sequence
  Synthetic peptide
EVQLVESGGGLVQPGGSLKLSCAASGFTFNRYAMNWVRQAPGKGLEWVARIRSKYNNYATYYADSVKGRFTISRDDSKNTAYLQMNNLKTEDTAVYYCVRHGNFGNSYLSYFAYWGQGTLVTVSSGGGGSGGGGSGGGGSQTVVTQEPSLTVSPGGTVTLTCGSSTGAVTSGYYPNWVQQKPGQAPRGLIGGTKFLAPGTPARFSGSLLGGKAALTLSGVQPEDEAEYYCALWYSNRWVFGGGTKLTVL

SEQ ID NO: 378 - protein, 14 aa, Artificial Sequence
  Synthetic peptide
RSSTGAVTSGYYPN

SEQ ID NO: 379 - protein, 7 aa, Artificial Sequence
  Synthetic peptide
ATDMRPS

SEQ ID NO: 380 - protein, 9 aa, Artificial Sequence
  Synthetic peptide
ALWYSNRWV

SEQ ID NO: 381 - protein, 5 aa, Artificial Sequence
  Synthetic peptide
VYAMN

SEQ ID NO: 382 - protein, 19 aa, Artificial Sequence
  Synthetic peptide
RIRSKYNNYATYYADSVKK

SEQ ID NO: 383 - protein, 14 aa, Artificial Sequence
  Synthetic peptide
HGNFGNSYLSWWAY

SEQ ID NO: 384 - protein, 125 aa, Artificial Sequence
  Synthetic peptide
EVQLVESGGGLVQPGGSLKLSCAASGFTFNVYAMNWVRQAPGKGLEWVARIRSKYNNYATYYADSVKKRFTISRDDSKNTAYLQMNNLKTEDTAVYYCVRHGNFGNSYLSWWAYWGQGTLVTVSS

SEQ ID NO: 385 - protein, 109 aa, Artificial Sequence
  Synthetic peptide
QTVVTQEPSLTVSPGGTVTLTCRSSTGAVTSGYYPNWVQQKPGQAPRGLIGATDMRPSGTPARFSGSLLGGKAALTLSGVQPEDEAEYYCALWYSNRWVFGGGTKLTVL

SEQ ID NO: 386 - protein, 249 aa, Artificial Sequence
  Synthetic peptide
EVQLVESGGGLVQPGGSLKLSCAASGFTFNVYAMNWVRQAPGKGLEWVARIRSKYNNYATYYADSVKKRFTISRDDSKNTAYLQMNNLKTEDTAVYYCVRHGNFGNSYLSWWAYWGQGTLVTVSSGGGGSGGGGSGGGGSQTVVTQEPSLTVSPGGTVTLTCRSSTGAVTSGYYPNWVQQKPGQAPRGLIGATDMRPSGTPARFSGSLLGGKAALTLSGVQPEDEAEYYCALWYSNRWVFGGGTKLTVL

SEQ ID NO: 387 - protein, 14 aa, Artificial Sequence
  Synthetic peptide
GSSTGAVTSGYYPN

SEQ ID NO: 388 - protein, 7 aa, Artificial Sequence
  Synthetic peptide
GTKFLAP

SEQ ID NO: 389 - protein, 9 aa, Artificial Sequence
  Synthetic peptide
ALWYSNRWV

SEQ ID NO: 390 - protein, 5 aa, Artificial Sequence
  Synthetic peptide
KYAMN

SEQ ID NO: 391 - protein, 19 aa, Artificial Sequence
  Synthetic peptide
RIRSKYNNYATYYADSVKS

SEQ ID NO: 392 - protein, 14 aa, Artificial Sequence
  Synthetic peptide
HGNFGNSYTSYYAY

SEQ ID NO: 393 - protein, 125 aa, Artificial Sequence
  Synthetic peptide
EVQLVESGGGLVQPGGSLKLSCAASGFTFNKYAMNWVRQAPGKGLEWVARIRSKYNNYATYYADSVKSRFTISRDDSKNTAYLQMNNLKTEDTAVYYCVRHGNFGNSYTSYYAYWGQGTLVTVSS

SEQ ID NO: 394 - protein, 109 aa, Artificial Sequence; identical to SEQ ID NO: 349
  Synthetic peptide

SEQ ID NO: 395 - protein, 249 aa, Artificial Sequence
  Synthetic peptide
EVQLVESGGGLVQPGGSLKLSCAASGFTFNKYAMNWVRQAPGKGLEWVARIRSKYNNYATYYADSVKSRFTISRDDSKNTAYLQMNNLKTEDTAVYYCVRHGNFGNSYTSYYAYWGQGTLVTVSSGGGGSGGGGSGGGGSQTVVTQEPSLTVSPGGTVTLTCGSSTGAVTSGYYPNWVQQKPGQAPRGLIGGTKFLAPGTPARFSGSLLGGKAALTLSGVQPEDEAEYYCALWYSNRWVFGGGTKLTVL

SEQ ID NO: 396 - protein, 14 aa, Artificial Sequence
  Synthetic peptide
RSSTGAVTSGYYPN

SEQ ID NO: 397 - protein, 7 aa, Artificial Sequence
  Synthetic peptide
ATDMRPS

SEQ ID NO: 398 - protein, 9 aa, Artificial Sequence
  Synthetic peptide
ALWYSNRWV

SEQ ID NO: 399 - protein, 5 aa, Artificial Sequence
  Synthetic peptide
GYAMN

SEQ ID NO: 400 - protein, 19 aa, Artificial Sequence
  Synthetic peptide
RIRSKYNNYATYYADSVKE

SEQ ID NO: 401 - protein, 14 aa, Artificial Sequence
  Synthetic peptide
HRNFGNSYLSWFAY

SEQ ID NO: 402 - protein, 125 aa, Artificial Sequence
  Synthetic peptide
EVQLVESGGGLVQPGGSLKLSCAASGFTFNGYAMNWVRQAPGKGLEWVARIRSKYNNYATYYADSVKERFTISRDDSKNTAYLQMNNLKTEDTAVYYCVRHRNFGNSYLSWFAYWGQGTLVTVSS

SEQ ID NO: 403 - protein, 109 aa, Artificial Sequence; identical to SEQ ID NO: 385
  Synthetic peptide

SEQ ID NO: 404 - protein, 249 aa, Artificial Sequence
  Synthetic peptide
EVQLVESGGGLVQPGGSLKLSCAASGFTFNGYAMNWVRQAPGKGLEWVARIRSKYNNYATYYADSVKERFTISRDDSKNTAYLQMNNLKTEDTAVYYCVRHRNFGNSYLSWFAYWGQGTLVTVSSGGGGSGGGGSGGGGSQTVVTQEPSLTVSPGGTVTLTCRSSTGAVTSGYYPNWVQQKPGQAPRGLIGATDMRPSGTPARFSGSLLGGKAALTLSGVQPEDEAEYYCALWYSNRWVFGGGTKLTVL

SEQ ID NO: 405 - protein, 14 aa, Artificial Sequence
  Synthetic peptide
GSSTGAVTSGYYPN

SEQ ID NO: 406 - protein, 7 aa, Artificial Sequence
  Synthetic peptide
GTKFLAP

SEQ ID NO: 407 - protein, 9 aa, Artificial Sequence
  Synthetic peptide
ALWYSNRWV

SEQ ID NO: 408 - protein, 5 aa, Artificial Sequence
  Synthetic peptide
VYAMN

SEQ ID NO: 409 - protein, 19 aa, Artificial Sequence
  Synthetic peptide
RIRSKYNNYATYYADSVKK

SEQ ID NO: 410 - protein, 14 aa, Artificial Sequence
  Synthetic peptide
HGNFGNSYISWWAY

SEQ ID NO: 411 - protein, 125 aa, Artificial Sequence
  Synthetic peptide
EVQLVESGGGLVQPGGSLKLSCAASGFTFNVYAMNWVRQAPGKGLEWVARIRSKYNNYATYYADSVKKRFTISRDDSKNTAYLQMNNLKTEDTAVYYCVRHGNFGNSYISWWAYWGQGTLVTVSS

SEQ ID NO: 412 - protein, 109 aa, Artificial Sequence; identical to SEQ ID NO: 349
  Synthetic peptide

SEQ ID NO: 413 - protein, 249 aa, Artificial Sequence
  Synthetic peptide
EVQLVESGGGLVQPGGSLKLSCAASGFTFNVYAMNWVRQAPGKGLEWVARIRSKYNNYATYYADSVKKRFTISRDDSKNTAYLQMNNLKTEDTAVYYCVRHGNFGNSYISWWAYWGQGTLVTVSSGGGGSGGGGSGGGGSQTVVTQEPSLTVSPGGTVTLTCGSSTGAVTSGYYPNWVQQKPGQAPRGLIGGTKFLAPGTPARFSGSLLGGKAALTLSGVQPEDEAEYYCALWYSNRWVFGGGTKLTVL

SEQ ID NO: 414 - protein, 14 aa, Artificial Sequence
  Synthetic peptide
GSSTGAVTSGNYPN

SEQ ID NO: 415 - protein, 7 aa, Artificial Sequence
  Synthetic peptide
GTKFLAP

SEQ ID NO: 416 - protein, 9 aa, Artificial Sequence
  Synthetic peptide
VLWYSNRWV

SEQ ID NO: 417 - protein, 5 aa, Artificial Sequence
  Synthetic peptide
SYAMN

SEQ ID NO: 418 - protein, 19 aa, Artificial Sequence
  Synthetic peptide
RIRSKYNNYATYYADSVKG

SEQ ID NO: 419 - protein, 14 aa, Artificial Sequence
  Synthetic peptide
HGNFGNSYVSWWAY

SEQ ID NO: 420 - protein, 125 aa, Artificial Sequence
  Synthetic peptide
EVQLVESGGGLVQPGGSLKLSCAASGFTFNSYAMNWVRQAPGKGLEWVARIRSKYNNYATYYADSVKGRFTISRDDSKNTAYLQMNNLKTEDTAVYYCVRHGNFGNSYVSWWAYWGQGTLVTVSS

SEQ ID NO: 421 - protein, 109 aa, Artificial Sequence
  Synthetic peptide
QTVVTQEPSLTVSPGGTVTLTCGSSTGAVTSGNYPNWVQQKPGQAPRGLIGGTKFLAPGTPARFSGSLLGGKAALTLSGVQPEDEAEYYCVLWYSNRWVFGGGTKLTVL

SEQ ID NO: 422 - protein, 249 aa, Artificial Sequence
  Synthetic peptide
EVQLVESGGGLVQPGGSLKLSCAASGFTFNSYAMNWVRQAPGKGLEWVARIRSKYNNYATYYADSVKGRFTISRDDSKNTAYLQMNNLKTEDTAVYYCVRHGNFGNSYVSWWAYWGQGTLVTVSSGGGGSGGGGSGGGGSQTVVTQEPSLTVSPGGTVTLTCGSSTGAVTSGNYPNWVQQKPGQAPRGLIGGTKFLAPGTPARFSGSLLGGKAALTLSGVQPEDEAEYYCVLWYSNRWVFGGGTKLTVL

SEQ ID NO: 423 - protein, 14 aa, Artificial Sequence
  Synthetic peptide
GSSTGAVTSGNYPN

SEQ ID NO: 424 - protein, 7 aa, Artificial Sequence
  Synthetic peptide
GTKFLAP

SEQ ID NO: 425 - protein, 9 aa, Artificial Sequence
  Synthetic peptide
VLWYSNRWV

SEQ ID NO: 426 - protein, 5 aa, Artificial Sequence
  Synthetic peptide
KYAMN

SEQ ID NO: 427 - protein, 19 aa, Artificial Sequence
  Synthetic peptide
RIRSKYNNYATYYADSVKD

SEQ ID NO: 428 - protein, 14 aa, Artificial Sequence
  Synthetic peptide
HGNFGNSYISYWAY

SEQ ID NO: 429 - protein, 125 aa, Artificial Sequence; identical to SEQ ID NO: 357
  Synthetic peptide

SEQ ID NO: 430 - protein, 109 aa, Artificial Sequence; identical to SEQ ID NO: 421
  Synthetic peptide

SEQ ID NO: 431 - protein, 249 aa, Artificial Sequence
  Synthetic peptide
EVQLVESGGGLVQPGGSLKLSCAASGFTFNKYAMNWVRQAPGKGLEWVARIRSKYNNYATYYADSVKDRFTISRDDSKNTAYLQMNNLKTEDTAVYYCVRHGNFGNSYISYWAYWGQGTLVTVSSGGGGSGGGGSGGGGSQTVVTQEPSLTVSPGGTVTLTCGSSTGAVTSGNYPNWVQQKPGQAPRGLIGGTKFLAPGTPARFSGSLLGGKAALTLSGVQPEDEAEYYCVLWYSNRWVFGGGTKLTVL

SEQ ID NO: 432 - protein, 125 aa, Artificial Sequence
  Synthetic peptide
EVQLVESGGGLVQPGGSLRLSCAASGFTFNSYAMNWVRQAPGKGLEWVARIRSKYNNYATYYADSVKGRFTISRDDSKNTAYLQMNSLKTEDTAVYYCVRHGNFGNSYVSWWAYWGQGTLVTVSS

SEQ ID NO: 433 - protein, 109 aa, Artificial Sequence; identical to SEQ ID NO: 421
  Synthetic peptide

SEQ ID NO: 434 - protein, 249 aa, Artificial Sequence
  Synthetic peptide
EVQLVESGGGLVQPGGSLRLSCAASGFTFNSYAMNWVRQAPGKGLEWVARIRSKYNNYATYYADSVKGRFTISRDDSKNTAYLQMNSLKTEDTAVYYCVRHGNFGNSYVSWWAYWGQGTLVTVSSGGGGSGGGGSGGGGSQTVVTQEPSLTVSPGGTVTLTCGSSTGAVTSGNYPNWVQQKPGQAPRGLIGGTKFLAPGTPARFSGSLLGGKAALTLSGVQPEDEAEYYCVLWYSNRWVFGGGTKLTVL

SEQ ID NO: 435 - protein, 118 aa, Artificial Sequence
  Synthetic peptide
QVQLQESGPGLVKPSETLSLTCTVSGGSISSYYWSWIRQPPGKCLEWIGYVYYSGTTNYNPSLKSRVTISVDTSKNQFSLKLSSVTAADTAVYYCASIAVTGFYFDYWGQGTLVTVSS

SEQ ID NO: 436 - protein, 108 aa, Artificial Sequence
  Synthetic peptide
EIVLTQSPGTLSLSPGERVTLSCRASQRVNNNYLAWYQQRPGQAPRLLIYGASSRATGIPDRFSGSGSGTDFTLTISRLEPEDFAVYYCQQYDRSPLTFGCGTKLEIK

SEQ ID NO: 437 - protein, 241 aa, Artificial Sequence
  Synthetic peptide
QVQLQESGPGLVKPSETLSLTCTVSGGSISSYYWSWIRQPPGKCLEWIGYVYYSGTTNYNPSLKSRVTISVDTSKNQFSLKLSSVTAADTAVYYCASIAVTGFYFDYWGQGTLVTVSSGGGGSGGGGSGGGGSEIVLTQSPGTLSLSPGERVTLSCRASQRVNNNYLAWYQQRPGQAPRLLIYGASSRATGIPDRFSGSGSGTDFTLTISRLEPEDFAVYYCQQYDRSPLTFGCGTKLEIK

SEQ ID NO: 438 - protein, 496 aa, Artificial Sequence
  Synthetic peptide
QVQLQESGPGLVKPSETLSLTCTVSGGSISSYYWSWIRQPPGKCLEWIGYVYYSGTTNYNPSLKSRVTISVDTSKNQFSLKLSSVTAADTAVYYCASIAVTGFYFDYWGQGTLVTVSSGGGGSGGGGSGGGGSEIVLTQSPGTLSLSPGERVTLSCRASQRVNNNYLAWYQQRPGQAPRLLIYGASSRATGIPDRFSGSGSGTDFTLTISRLEPEDFAVYYCQQYDRSPLTFGCGTKLEIKSGGGGSEVQLVESGGGLVQPGGSLKLSCAASGFTFNKYAMNWVRQAPGKGLEWVARIRSKYNNYATYYADSVKDRFTISRDDSKNTAYLQMNNLKTEDTAVYYCVRHGNFGNSYISYWAYWGQGTLVTVSSGGGGSGGGGSGGGGSQTVVTQEPSLTVSPGGTVTLTCGSSTGAVTSGNYPNWVQQKPGQAPRGLIGGTKFLAPGTPARFSGSLLGGKAALTLSGVQPEDEAEYYCVLWYSNRWVFGGGTKLTVL

SEQ ID NO: 439 - protein, 17 aa, Artificial Sequence
  Synthetic peptide
IINPSEGSTSYAQKFQG

SEQ ID NO: 440 - protein, 17 aa, Artificial Sequence
  Synthetic peptide
IINPSDASTSYAQKFQG

SEQ ID NO: 441 - protein, 16 aa, Artificial Sequence
  Synthetic peptide
RSSQSLVYREGNTYLS

SEQ ID NO: 442 - protein, 16 aa, Artificial Sequence
  Synthetic peptide
RSSQSLVYRDANTYLS

SEQ ID NO: 443 - protein, 16 aa, Artificial Sequence
  Synthetic peptide
RSSQSLVYRDGQTYLS

SEQ ID NO: 444 - protein, 16 aa, Artificial Sequence
  Synthetic peptide
RSSQSLVYRDGNAYLS

SEQ ID NO: 445 - protein, 123 aa, Artificial Sequence
  Synthetic peptide
QVQLVQSGAEVKKPGASVKVSCKASGYTFTNYYMHWVRQAPGQGLEWMGIINPSDGSTSYAQKFQGRVTMTRDTSTNTVYMDLSSLRSEDTAVYYCARGGNSAFYSYYDMDVWGQGTTVTVSS

SEQ ID NO: 446 - protein, 123 aa, Artificial Sequence
  Synthetic peptide
QVQLVQSGAEVKKPGASVKVSCKASGYTFTNYYMHWVRQAPGLGLEWMGIINPSEGSTSYAQKFQGRVTMTRDTSTNTVYMDLSSLRSEDTAVYYCARGGNSAFYSYYDMDVWGQGTTVTVSS

SEQ ID NO: 447 - protein, 123 aa, Artificial Sequence
  Synthetic peptide
QVQLVQSGAEVKKPGASVKVSCKASGYTFTNYYMHWVRQAPGLGLEWMGIINPSDASTSYAQKFQGRVTMTRDTSTNTVYMDLSSLRSEDTAVYYCARGGNSAFYSYYDMDVWGQGTTVTVSS

SEQ ID NO: 448 - protein, 123 aa, Artificial Sequence
  Synthetic peptide
QVQLVQSGAEVKKPGASVKVSCKASGYTFTNYYMHWVRQAPGQGLEWMGIINPSEGSTSYAQKFQGRVTMTRDTSTNTVYMDLSSLRSEDTAVYYCARGGNSAFYSYYDMDVWGQGTTVTVSS

SEQ ID NO: 449 - protein, 122 aa, Artificial Sequence
  Synthetic peptide
QVQLVQSGAEVKKPGASVKVSCKASGYTFTNYYMHWVRQAPGQGLEWMGIINPSDASTSYAQKFQGRVTMTRDTSTNTVYMDLSSLRSEDTAVYYCARGGNSAFYSYYDMDVWGQGTTVTVS

SEQ ID NO: 450 - protein, 123 aa, Artificial Sequence
  Synthetic peptide
QVQLVQSGAEVKKPGASVKVSCKASGYTFTNYYMHWVRQAPGLCLEWMGIINPSDGSTSYAQKFQGRVTMTRDTSTNTVYMDLSSLRSEDTAVYYCARGGNSAFYSYYDMDVWGQGTTVTVSS

SEQ ID NO: 451 - protein, 123 aa, Artificial Sequence
  Synthetic peptide
QVQLVQSGAEVKKPGASVKVSCKASGYTFTNYYMHWVRQAPGQCLEWMGIINPSDGSTSYAQKFQGRVTMTRDTSTNTVYMDLSSLRSEDTAVYYCARGGNSAFYSYYDMDVWGQGTTVTVSS

SEQ ID NO: 452 - protein, 123 aa, Artificial Sequence
  Synthetic peptide
QVQLVQSGAEVKKPGASVKVSCKASGYTFTNYYMHWVRQAPGLCLEWMGIINPSEGSTSYAQKFQGRVTMTRDTSTNTVYMDLSSLRSEDTAVYYCARGGNSAFYSYYDMDVWGQGTTVTVSS

SEQ ID NO: 453 - protein, 123 aa, Artificial Sequence
  Synthetic peptide
QVQLVQSGAEVKKPGASVKVSCKASGYTFTNYYMHWVRQAPGLCLEWMGIINPSDASTSYAQKFQGRVTMTRDTSTNTVYMDLSSLRSEDTAVYYCARGGNSAFYSYYDMDVWGQGTTVTVSS

SEQ ID NO: 454 - protein, 123 aa, Artificial Sequence
  Synthetic peptide
QVQLVQSGAEVKKPGASVKVSCKASGYTFTNYYMHWVRQAPGQCLEWMGIINPSEGSTSYAQKFQGRVTMTRDTSTNTVYMDLSSLRSEDTAVYYCARGGNSAFYSYYDMDVWGQGTTVTVSS

SEQ ID NO: 455 - protein, 123 aa, Artificial Sequence
  Synthetic peptide
QVQLVQSGAEVKKPGASVKVSCKASGYTFTNYYMHWVRQAPGQCLEWMGIINPSDASTSYAQKFQGRVTMTRDTSTNTVYMDLSSLRSEDTAVYYCARGGNSAFYSYYDMDVWGQGTTVTVSS

SEQ ID NO: 456 - protein, 112 aa, Artificial Sequence
  Synthetic peptide
DVVMTQTPLSLPVTLGQPASISCRSSQSLVYREGNTYLSWFQQRPGQSPRRLIYKVSNWQSGVPDRFSGGGSGTDFTLKISRVEAEDVGVYYCMQGTHWPPTFGQGTKVEIK

SEQ ID NO: 457 - protein, 112 aa, Artificial Sequence
  Synthetic peptide
DVVMTQTPLSLPVTLGQPASISCRSSQSLVYRDANTYLSWFQQRPGQSPRRLIYKVSNWQSGVPDRFSGGGSGTDFTLKISRVEAEDVGVYYCMQGTHWPPTFGQGTKVEIK

SEQ ID NO: 458 - protein, 112 aa, Artificial Sequence
  Synthetic peptide
DVVMTQTPLSLPVTLGQPASISCRSSQSLVYRDGQTYLSWFQQRPGQSPRRLIYKVSNWQSGVPDRFSGGGSGTDFTLKISRVEAEDVGVYYCMQGTHWPPTFGQGTKVEIK

SEQ ID NO: 459 - protein, 112 aa, Artificial Sequence
  Synthetic peptide
DVVMTQTPLSLPVTLGQPASISCRSSQSLVYRDGNAYLSWFQQRPGQSPRRLIYKVSNWQSGVPDRFSGGGSGTDFTLKISRVEAEDVGVYYCMQGTHWPPTFGQGTKVEIK

SEQ ID NO: 460 - protein, 112 aa, Artificial Sequence
  Synthetic peptide
DVVMTQTPLSLPVTLGQPASISCRSSQSLVYRDGNTYLSWFQQRPGQSPRRLIYKVSNWQSGVPDRFSGSGSGTDFTLKISRVEAEDVGVYYCMQGTHWPPTFGQGTKVEIK

SEQ ID NO: 461 - protein, 112 aa, Artificial Sequence
  Synthetic peptide
DVVMTQTPLSLPVTLGQPASISCRSSQSLVYREGNTYLSWFQQRPGQSPRRLIYKVSNWQSGVPDRFSGSGSGTDFTLKISRVEAEDVGVYYCMQGTHWPPTFGQGTKVEIK

SEQ ID NO: 462 - protein, 112 aa, Artificial Sequence
  Synthetic peptide
DVVMTQTPLSLPVTLGQPASISCRSSQSLVYRDANTYLSWFQQRPGQSPRRLIYKVSNWQSGVPDRFSGSGSGTDFTLKISRVEAEDVGVYYCMQGTHWPPTFGQGTKVEIK

SEQ ID NO: 463 - protein, 112 aa, Artificial Sequence
  Synthetic peptide
DVVMTQTPLSLPVTLGQPASISCRSSQSLVYRDGNTYLSWFQQRPGQSPRRLIYKVSNWQSGVPDRFSGGGSGTDFTLKISRVEAEDVGVYYCMQGTHWPPTFGCGTKVEIK

SEQ ID NO: 464 - protein, 112 aa, Artificial Sequence
  Synthetic peptide
DVVMTQTPLSLPVTLGQPASISCRSSQSLVYREGNTYLSWFQQRPGQSPRRLIYKVSNWQSGVPDRFSGGGSGTDFTLKISRVEAEDVGVYYCMQGTHWPPTFGCGTKVEIK

SEQ ID NO: 465 - protein, 112 aa, Artificial Sequence
  Synthetic peptide
DVVMTQTPLSLPVTLGQPASISCRSSQSLVYRDANTYLSWFQQRPGQSPRRLIYKVSNWQSGVPDRFSGGGSGTDFTLKISRVEAEDVGVYYCMQGTHWPPTFGCGTKVEIK

SEQ ID NO: 466 - protein, 112 aa, Artificial Sequence
  Synthetic peptide
DVVMTQTPLSLPVTLGQPASISCRSSQSLVYRDGQTYLSWFQQRPGQSPRRLIYKVSNWQSGVPDRFSGGGSGTDFTLKISRVEAEDVGVYYCMQGTHWPPTFGCGTKVEIK

SEQ ID NO: 467 - protein, 112 aa, Artificial Sequence
  Synthetic peptide
DVVMTQTPLSLPVTLGQPASISCRSSQSLVYRDGNAYLSWFQQRPGQSPRRLIYKVSNWQSGVPDRFSGGGSGTDFTLKISRVEAEDVGVYYCMQGTHWPPTFGCGTKVEIK

SEQ ID NO: 468 - protein, 112 aa, Artificial Sequence
  Synthetic peptide
DVVMTQTPLSLPVTLGQPASISCRSSQSLVYRDGNTYLSWFQQRPGQSPRRLIYKVSNWQSGVPDRFSGSGSGTDFTLKISRVEAEDVGVYYCMQGTHWPPTFGCGTKVEIK

SEQ ID NO: 469 - protein, 112 aa, Artificial Sequence
  Synthetic peptide
DVVMTQTPLSLPVTLGQPASISCRSSQSLVYREGNTYLSWFQQRPGQSPRRLIYKVSNWQSGVPDRFSGSGSGTDFTLKISRVEAEDVGVYYCMQGTHWPPTFGCGTKVEIK

SEQ ID NO: 470 - protein, 112 aa, Artificial Sequence
  Synthetic peptide
DVVMTQTPLSLPVTLGQPASISCRSSQSLVYRDANTYLSWFQQRPGQSPRRLIYKVSNWQSGVPDRFSGSGSGTDFTLKISRVEAEDVGVYYCMQGTHWPPTFGCGTKVEIK

SEQ ID NO: 471 - protein, 250 aa, Artificial Sequence
  Synthetic peptide
QVQLVQSGAEVKKPGASVKVSCKASGYTFTNYYMHWVRQAPGLGLEWMGIINPSDGSTSYAQKFQGRVTMTRDTSTNTVYMDLSSLRSEDTAVYYCARGGNSAFYSYYDMDVWGQGTTVTVSSGGGGSGGGGSGGGGSDVVMTQTPLSLPVTLGQPASISCRSSQSLVYREGNTYLSWFQQRPGQSPRRLIYKVSNWQSGVPDRFSGGGSGTDFTLKISRVEAEDVGVYYCMQGTHWPPTFGQGTKVEIK

SEQ ID NO: 472 - protein, 250 aa, Artificial Sequence
  Synthetic peptide
QVQLVQSGAEVKKPGASVKVSCKASGYTFTNYYMHWVRQAPGLGLEWMGIINPSDGSTSYAQKFQGRVTMTRDTSTNTVYMDLSSLRSEDTAVYYCARGGNSAFYSYYDMDVWGQGTTVTVSSGGGGSGGGGSGGGGSDVVMTQTPLSLPVTLGQPASISCRSSQSLVYRDANTYLSWFQQRPGQSPRRLIYKVSNWQSGVPDRFSGGGSGTDFTLKISRVEAEDVGVYYCMQGTHWPPTFGQGTKVEIK

SEQ ID NO: 473 - protein, 250 aa, Artificial Sequence
  Synthetic peptide
QVQLVQSGAEVKKPGASVKVSCKASGYTFTNYYMHWVRQAPGLGLEWMGIINPSDGSTSYAQKFQGRVTMTRDTSTNTVYMDLSSLRSEDTAVYYCARGGNSAFYSYYDMDVWGQGTTVTVSSGGGGSGGGGSGGGGSDVVMTQTPLSLPVTLGQPASISCRSSQSLVYRDGQTYLSWFQQRPGQSPRRLIYKVSNWQSGVPDRFSGGGSGTDFTLKISRVEAEDVGVYYCMQGTHWPPTFGQGTKVEIK

SEQ ID NO: 474 - protein, 250 aa, Artificial Sequence
  Synthetic peptide
QVQLVQSGAEVKKPGASVKVSCKASGYTFTNYYMHWVRQAPGLGLEWMGIINPSDGSTSYAQKFQGRVTMTRDTSTNTVYMDLSSLRSEDTAVYYCARGGNSAFYSYYDMDVWGQGTTVTVSSGGGGSGGGGSGGGGSDVVMTQTPLSLPVTLGQPASISCRSSQSLVYRDGNAYLSWFQQRPGQSPRRLIYKVSNWQSGVPDRFSGGGSGTDFTLKISRVEAEDVGVYYCMQGTHWPPTFGQGTKVEIK

SEQ ID NO: 475 - protein, 250 aa, Artificial Sequence
  Synthetic peptide
QVQLVQSGAEVKKPGASVKVSCKASGYTFTNYYMHWVRQAPGLGLEWMGIINPSDGSTSYAQKFQGRVTMTRDTSTNTVYMDLSSLRSEDTAVYYCARGGNSAFYSYYDMDVWGQGTTVTVSSGGGGSGGGGSGGGGSDVVMTQTPLSLPVTLGQPASISCRSSQSLVYRDGNTYLSWFQQRPGQSPRRLIYKVSNWQSGVPDRFSGSGSGTDFTLKISRVEAEDVGVYYCMQGTHWPPTFGQGTKVEIK

SEQ ID NO: 476 - protein, 250 aa, Artificial Sequence
  Synthetic peptide
QVQLVQSGAEVKKPGASVKVSCKASGYTFTNYYMHWVRQAPGQGLEWMGIINPSDGSTSYAQKFQGRVTMTRDTSTNTVYMDLSSLRSEDTAVYYCARGGNSAFYSYYDMDVWGQGTTVTVSSGGGGSGGGGSGGGGSDVVMTQTPLSLPVTLGQPASISCRSSQSLVYRDGNTYLSWFQQRPGQSPRRLIYKVSNWQSGVPDRFSGGGSGTDFTLKISRVEAEDVGVYYCMQGTHWPPTFGQGTKVEIK

SEQ ID NO: 477 - protein, 250 aa, Artificial Sequence
  Synthetic peptide
QVQLVQSGAEVKKPGASVKVSCKASGYTFTNYYMHWVRQAPGLGLEWMGIINPSEGSTSYAQKFQGRVTMTRDTSTNTVYMDLSSLRSEDTAVYYCARGGNSAFYSYYDMDVWGQGTTVTVSSGGGGSGGGGSGGGGSDVVMTQTPLSLPVTLGQPASISCRSSQSLVYRDGNTYLSWFQQRPGQSPRRLIYKVSNWQSGVPDRFSGGGSGTDFTLKISRVEAEDVGVYYCMQGTHWPPTFGQGTKVEIK

SEQ ID NO: 478 - protein, 250 aa, Artificial Sequence
  Synthetic peptide
QVQLVQSGAEVKKPGASVKVSCKASGYTFTNYYMHWVRQAPGLGLEWMGIINPSDASTSYAQKFQGRVTMTRDTSTNTVYMDLSSLRSEDTAVYYCARGGNSAFYSYYDMDVWGQGTTVTVSSGGGGSGGGGSGGGGSDVVMTQTPLSLPVTLGQPASISCRSSQSLVYRDGNTYLSWFQQRPGQSPRRLIYKVSNWQSGVPDRFSGGGSGTDFTLKISRVEAEDVGVYYCMQGTHWPPTFGQGTKVEIK

SEQ ID NO: 479 - protein, 250 aa, Artificial Sequence
  Synthetic peptide
QVQLVQSGAEVKKPGASVKVSCKASGYTFTNYYMHWVRQAPGQGLEWMGIINPSDGSTSYAQKFQGRVTMTRDTSTNTVYMDLSSLRSEDTAVYYCARGGNSAFYSYYDMDVWGQGTTVTVSSGGGGSGGGGSGGGGSDVVMTQTPLSLPVTLGQPASISCRSSQSLVYRDGNTYLSWFQQRPGQSPRRLIYKVSNWQSGVPDRFSGSGSGTDFTLKISRVEAEDVGVYYCMQGTHWPPTFGQGTKVEIK

SEQ ID NO: 480 - protein, 250 aa, Artificial Sequence
  Synthetic peptide
QVQLVQSGAEVKKPGASVKVSCKASGYTFTNYYMHWVRQAPGQGLEWMGIINPSEGSTSYAQKFQGRVTMTRDTSTNTVYMDLSSLRSEDTAVYYCARGGNSAFYSYYDMDVWGQGTTVTVSSGGGGSGGGGSGGGGSDVVMTQTPLSLPVTLGQPASISCRSSQSLVYREGNTYLSWFQQRPGQSPRRLIYKVSNWQSGVPDRFSGSGSGTDFTLKISRVEAEDVGVYYCMQGTHWPPTFGQGTKVEIK

SEQ ID NO: 481 - protein, 250 aa, Artificial Sequence
  Synthetic peptide
QVQLVQSGAEVKKPGASVKVSCKASGYTFTNYYMHWVRQAPGQGLEWMGIINPSDASTSYAQKFQGRVTMTRDTSTNTVYMDLSSLRSEDTAVYYCARGGNSAFYSYYDMDVWGQGTTVTVSSGGGGSGGGGSGGGGSDVVMTQTPLSLPVTLGQPASISCRSSQSLVYRDANTYLSWFQQRPGQSPRRLIYKVSNWQSGVPDRFSGSGSGTDFTLKISRVEAEDVGVYYCMQGTHWPPTFGQGTKVEIK

SEQ ID NO: 482 - protein, 250 aa, Artificial Sequence
  Synthetic peptide
QVQLVQSGAEVKKPGASVKVSCKASGYTFTNYYMHWVRQAPGLCLEWMGIINPSDGSTSYAQKFQGRVTMTRDTSTNTVYMDLSSLRSEDTAVYYCARGGNSAFYSYYDMDVWGQGTTVTVSSGGGGSGGGGSGGGGSDVVMTQTPLSLPVTLGQPASISCRSSQSLVYRDGNTYLSWFQQRPGQSPRRLIYKVSNWQSGVPDRFSGGGSGTDFTLKISRVEAEDVGVYYCMQGTHWPPTFGCGTKVEIK

SEQ ID NO: 483 - protein, 250 aa, Artificial Sequence
  Synthetic peptide
QVQLVQSGAEVKKPGASVKVSCKASGYTFTNYYMHWVRQAPGLCLEWMGIINPSDGSTSYAQKFQGRVTMTRDTSTNTVYMDLSSLRSEDTAVYYCARGGNSAFYSYYDMDVWGQGTTVTVSSGGGGSGGGGSGGGGSDVVMTQTPLSLPVTLGQPASISCRSSQSLVYREGNTYLSWFQQRPGQSPRRLIYKVSNWQSGVPDRFSGGGSGTDFTLKISRVEAEDVGVYYCMQGTHWPPTFGCGTKVEIK

SEQ ID NO: 484 - protein, 250 aa, Artificial Sequence
  Synthetic peptide
QVQLVQSGAEVKKPGASVKVSCKASGYTFTNYYMHWVRQAPGLCLEWMGIINPSDGSTSYAQKFQGRVTMTRDTSTNTVYMDLSSLRSEDTAVYYCARGGNSAFYSYYDMDVWGQGTTVTVSSGGGGSGGGGSGGGGSDVVMTQTPLSLPVTLGQPASISCRSSQSLVYRDANTYLSWFQQRPGQSPRRLIYKVSNWQSGVPDRFSGGGSGTDFTLKISRVEAEDVGVYYCMQGTHWPPTFGCGTKVEIK

SEQ ID NO: 485 - protein, 250 aa, Artificial Sequence
  Synthetic peptide
QVQLVQSGAEVKKPGASVKVSCKASGYTFTNYYMHWVRQAPGLCLEWMGIINPSDGSTSYAQKFQGRVTMTRDTSTNTVYMDLSSLRSEDTAVYYCARGGNSAFYSYYDMDVWGQGTTVTVSSGGGGSGGGGSGGGGSDVVMTQTPLSLPVTLGQPASISCRSSQSLVYRDGQTYLSWFQQRPGQSPRRLIYKVSNWQSGVPDRFSGGGSGTDFTLKISRVEAEDVGVYYCMQGTHWPPTFGCGTKVEIK

SEQ ID NO: 486 - protein, 250 aa, Artificial Sequence
  Synthetic peptide
QVQLVQSGAEVKKPGASVKVSCKASGYTFTNYYMHWVRQAPGLCLEWMGIINPSDGSTSYAQKFQGRVTMTRDTSTNTVYMDLSSLRSEDTAVYYCARGGNSAFYSYYDMDVWGQGTTVTVSSGGGGSGGGGSGGGGSDVVMTQTPLSLPVTLGQPASISCRSSQSLVYRDGNAYLSWFQQRPGQSPRRLIYKVSNWQSGVPDRFSGGGSGTDFTLKISRVEAEDVGVYYCMQGTHWPPTFGCGTKVEIK

SEQ ID NO: 487 - protein, 250 aa, Artificial Sequence
  Synthetic peptide
QVQLVQSGAEVKKPGASVKVSCKASGYTFTNYYMHWVRQAPGLCLEWMGIINPSDGSTSYAQKFQGRVTMTRDTSTNTVYMDLSSLRSEDTAVYYCARGGNSAFYSYYDMDVWGQGTTVTVSSGGGGSGGGGSGGGGSDVVMTQTPLSLPVTLGQPASISCRSSQSLVYRDGNTYLSWFQQRPGQSPRRLIYKVSNWQSGVPDRFSGSGSGTDFTLKISRVEAEDVGVYYCMQGTHWPPTFGCGTKVEIK

SEQ ID NO: 488 - protein, 250 aa, Artificial Sequence
  Synthetic peptide
QVQLVQSGAEVKKPGASVKVSCKASGYTFTNYYMHWVRQAPGQCLEWMGIINPSDGSTSYAQKFQGRVTMTRDTSTNTVYMDLSSLRSEDTAVYYCARGGNSAFYSYYDMDVWGQGTTVTVSSGGGGSGGGGSGGGGSDVVMTQTPLSLPVTLGQPASISCRSSQSLVYRDGNTYLSWFQQRPGQSPRRLIYKVSNWQSGVPDRFSGGGSGTDFTLKISRVEAEDVGVYYCMQGTHWPPTFGCGTKVEIK

SEQ ID NO: 489 - protein, 250 aa, Artificial Sequence
  Synthetic peptide
QVQLVQSGAEVKKPGASVKVSCKASGYTFTNYYMHWVRQAPGLCLEWMGIINPSEGSTSYAQKFQGRVTMTRDTSTNTVYMDLSSLRSEDTAVYYCARGGNSAFYSYYDMDVWGQGTTVTVSSGGGGSGGGGSGGGGSDVVMTQTPLSLPVTLGQPASISCRSSQSLVYRDGNTYLSWFQQRPGQSPRRLIYKVSNWQSGVPDRFSGGGSGTDFTLKISRVEAEDVGVYYCMQGTHWPPTFGCGTKVEIK

SEQ ID NO: 490 - protein, 250 aa, Artificial Sequence
  Synthetic peptide
QVQLVQSGAEVKKPGASVKVSCKASGYTFTNYYMHWVRQAPGLCLEWMGIINPSDASTSYAQKFQGRVTMTRDTSTNTVYMDLSSLRSEDTAVYYCARGGNSAFYSYYDMDVWGQGTTVTVSSGGGGSGGGGSGGGGSDVVMTQTPLSLPVTLGQPASISCRSSQSLVYRDGNTYLSWFQQRPGQSPRRLIYKVSNWQSGVPDRFSGGGSGTDFTLKISRVEAEDVGVYYCMQGTHWPPTFGCGTKVEIK

SEQ ID NO: 491 - protein, 250 aa, Artificial Sequence
  Synthetic peptide
QVQLVQSGAEVKKPGASVKVSCKASGYTFTNYYMHWVRQAPGQCLEWMGIINPSDGSTSYAQKFQGRVTMTRDTSTNTVYMDLSSLRSEDTAVYYCARGGNSAFYSYYDMDVWGQGTTVTVSSGGGGSGGGGSGGGGSDVVMTQTPLSLPVTLGQPASISCRSSQSLVYRDGNTYLSWFQQRPGQSPRRLIYKVSNWQSGVPDRFSGSGSGTDFTLKISRVEAEDVGVYYCMQGTHWPPTFGCGTKVEIK

SEQ ID NO: 492 - protein, 250 aa, Artificial Sequence
  Synthetic peptide
QVQLVQSGAEVKKPGASVKVSCKASGYTFTNYYMHWVRQAPGQCLEWMGIINPSEGSTSYAQKFQGRVTMTRDTSTNTVYMDLSSLRSEDTAVYYCARGGNSAFYSYYDMDVWGQGTTVTVSSGGGGSGGGGSGGGGSDVVMTQTPLSLPVTLGQPASISCRSSQSLVYREGNTYLSWFQQRPGQSPRRLIYKVSNWQSGVPDRFSGSGSGTDFTLKISRVEAEDVGVYYCMQGTHWPPTFGCGTKVEIK

SEQ ID NO: 493 - protein, 250 aa, Artificial Sequence
  Synthetic peptide
QVQLVQSGAEVKKPGASVKVSCKASGYTFTNYYMHWVRQAPGQCLEWMGIINPSDASTSYAQKFQGRVTMTRDTSTNTVYMDLSSLRSEDTAVYYCARGGNSAFYSYYDMDVWGQGTTVTVSSGGGGSGGGGSGGGGSDVVMTQTPLSLPVTLGQPASISCRSSQSLVYRDANTYLSWFQQRPGQSPRRLIYKVSNWQSGVPDRFSGSGSGTDFTLKISRVEAEDVGVYYCMQGTHWPPTFGCGTKVEIK

SEQ ID NO: 494 - protein, 505 aa, Artificial Sequence
  Synthetic peptide
QVQLVQSGAEVKKPGASVKVSCKASGYTFTNYYMHWVRQAPGLGLEWMGIINPSDGSTSYAQKFQGRVTMTRDTSTNTVYMDLSSLRSEDTAVYYCARGGNSAFYSYYDMDVWGQGTTVTVSSGGGGSGGGGSGGGGSDVVMTQTPLSLPVTLGQPASISCRSSQSLVYREGNTYLSWFQQRPGQSPRRLIYKVSNWQSGVPDRFSGGGSGTDFTLKISRVEAEDVGVYYCMQGTHWPPTFGQGTKVEIKSGGGGSEVQLVESGGGLVQPGGSLKLSCAASGFTFNKYAMNWVRQAPGKGLEWVARIRSKYNNYATYYADSVKDRFTISRDDSKNTAYLQMNNLKTEDTAVYYCVRHGNFGNSYISYWAYWGQGTLVTVSSGGGGSGGGGSGGGGSQTVVTQEPSLTVSPGGTVTLTCGSSTGAVTSGNYPNWVQQKPGQAPRGLIGGTKFLAPGTPARFSGSLLGGKAALTLSGVQPEDEAEYYCVLWYSNRWVFGGGTKLTVL

SEQ ID NO: 495 - protein, 505 aa, Artificial Sequence
  Synthetic peptide
QVQLVQSGAEVKKPGASVKVSCKASGYTFTNYYMHWVRQAPGLGLEWMGIINPSDGSTSYAQKFQGRVTMTRDTSTNTVYMDLSSLRSEDTAVYYCARGGNSAFYSYYDMDVWGQGTTVTVSSGGGGSGGGGSGGGGSDVVMTQTPLSLPVTLGQPASISCRSSQSLVYRDANTYLSWFQQRPGQSPRRLIYKVSNWQSGVPDRFSGGGSGTDFTLKISRVEAEDVGVYYCMQGTHWPPTFGQGTKVEIKSGGGGSEVQLVESGGGLVQPGGSLKLSCAASGFTFNKYAMNWVRQAPGKGLEWVARIRSKYNNYATYYADSVKDRFTISRDDSKNTAYLQMNNLKTEDTAVYYCVRHGNFGNSYISYWAYWGQGTLVTVSSGGGGSGGGGSGGGGSQTVVTQEPSLTVSPGGTVTLTCGSSTGAVTSGNYPNWVQQKPGQAPRGLIGGTKFLAPGTPARFSGSLLGGKAALTLSGVQPEDEAEYYCVLWYSNRWVFGGGTKLTVL

SEQ ID NO: 496 - protein, 505 aa, Artificial Sequence
  Synthetic peptide
QVQLVQSGAEVKKPGASVKVSCKASGYTFTNYYMHWVRQAPGLGLEWMGIINPSDGSTSYAQKFQGRVTMTRDTSTNTVYMDLSSLRSEDTAVYYCARGGNSAFYSYYDMDVWGQGTTVTVSSGGGGSGGGGSGGGGSDVVMTQTPLSLPVTLGQPASISCRSSQSLVYRDGQTYLSWFQQRPGQSPRRLIYKVSNWQSGVPDRFSGGGSGTDFTLKISRVEAEDVGVYYCMQGTHWPPTFGQGTKVEIKSGGGGSEVQLVESGGGLVQPGGSLKLSCAASGFTFNKYAMNWVRQAPGKGLEWVARIRSKYNNYATYYADSVKDRFTISRDDSKNTAYLQMNNLKTEDTAVYYCVRHGNFGNSYISYWAYWGQGTLVTVSSGGGGSGGGGSGGGGSQTVVTQEPSLTVSPGGTVTLTCGSSTGAVTSGNYPNWVQQKPGQAPRGLIGGTKFLAPGTPARFSGSLLGGKAALTLSGVQPEDEAEYYCVLWYSNRWVFGGGTKLTVL

SEQ ID NO: 497 - protein, 505 aa, Artificial Sequence
  Synthetic peptide
QVQLVQSGAEVKKPGASVKVSCKASGYTFTNYYMHWVRQAPGLGLEWMGIINPSDGSTSYAQKFQGRVTMTRDTSTNTVYMDLSSLRSEDTAVYYCARGGNSAFYSYYDMDVWGQGTTVTVSSGGGGSGGGGSGGGGSDVVMTQTPLSLPVTLGQPASISCRSSQSLVYRDGNAYLSWFQQRPGQSPRRLIYKVSNWQSGVPDRFSGGGSGTDFTLKISRVEAEDVGVYYCMQGTHWPPTFGQGTKVEIKSGGGGSEVQLVESGGGLVQPGGSLKLSCAASGFTFNKYAMNWVRQAPGKGLEWVARIRSKYNNYATYYADSVKDRFTISRDDSKNTAYLQMNNLKTEDTAVYYCVRHGNFGNSYISYWAYWGQGTLVTVSSGGGGSGGGGSGGGGSQTVVTQEPSLTVSPGGTVTLTCGSSTGAVTSGNYPNWVQQKPGQAPRGLIGGTKFLAPGTPARFSGSLLGGKAALTLSGVQPEDEAEYYCVLWYSNRWVFGGGTKLTVL

SEQ ID NO: 498 - protein, 505 aa, Artificial Sequence
  Synthetic peptide
QVQLVQSGAEVKKPGASVKVSCKASGYTFTNYYMHWVRQAPGLGLEWMGIINPSDGSTSYAQKFQGRVTMTRDTSTNTVYMDLSSLRSEDTAVYYCARGGNSAFYSYYDMDVWGQGTTVTVSSGGGGSGGGGSGGGGSDVVMTQTPLSLPVTLGQPASISCRSSQSLVYRDGNTYLSWFQQRPGQSPRRLIYKVSNWQSGVPDRFSGSGSGTDFTLKISRVEAEDVGVYYCMQGTHWPPTFGQGTKVEIKSGGGGSEVQLVESGGGLVQPGGSLKLSCAASGFTFNKYAMNWVRQAPGKGLEWVARIRSKYNNYATYYADSVKDRFTISRDDSKNTAYLQMNNLKTEDTAVYYCVRHGNFGNSYISYWAYWGQGTLVTVSSGGGGSGGGGSGGGGSQTVVTQEPSLTVSPGGTVTLTCGSSTGAVTSGNYPNWVQQKPGQAPRGLIGGTKFLAPGTPARFSGSLLGGKAALTLSGVQPEDEAEYYCVLWYSNRWVFGGGTKLTVL

SEQ ID NO: 499 - protein, 505 aa, Artificial Sequence
  Synthetic peptide
QVQLVQSGAEVKKPGASVKVSCKASGYTFTNYYMHWVRQAPGQGLEWMGIINPSDGSTSYAQKFQGRVTMTRDTSTNTVYMDLSSLRSEDTAVYYCARGGNSAFYSYYDMDVWGQGTTVTVSSGGGGSGGGGSGGGGSDVVMTQTPLSLPVTLGQPASISCRSSQSLVYRDGNTYLSWFQQRPGQSPRRLIYKVSNWQSGVPDRFSGGGSGTDFTLKISRVEAEDVGVYYCMQGTHWPPTFGQGTKVEIKSGGGGSEVQLVESGGGLVQPGGSLKLSCAASGFTFNKYAMNWVRQAPGKGLEWVARIRSKYNNYATYYADSVKDRFTISRDDSKNTAYLQMNNLKTEDTAVYYCVRHGNFGNSYISYWAYWGQGTLVTVSSGGGGSGGGGSGGGGSQTVVTQEPSLTVSPGGTVTLTCGSSTGAVTSGNYPNWVQQKPGQAPRGLIGGTKFLAPGTPARFSGSLLGGKAALTLSGVQPEDEAEYYCVLWYSNRWVFGGGTKLTVL

SEQ ID NO: 500 - protein, 505 aa, Artificial Sequence
  Synthetic peptide
QVQLVQSGAEVKKPGASVKVSCKASGYTFTNYYMHWVRQAPGLGLEWMGIINPSEGSTSYAQKFQGRVTMTRDTSTNTVYMDLSSLRSEDTAVYYCARGGNSAFYSYYDMDVWGQGTTVTVSSGGGGSGGGGSGGGGSDVVMTQTPLSLPVTLGQPASISCRSSQSLVYRDGNTYLSWFQQRPGQSPRRLIYKVSNWQSGVPDRFSGGGSGTDFTLKISRVEAEDVGVYYCMQGTHWPPTFGQGTKVEIKSGGGGSEVQLVESGGGLVQPGGSLKLSCAASGFTFNKYAMNWVRQAPGKGLEWVARIRSKYNNYATYYADSVKDRFTISRDDSKNTAYLQMNNLKTEDTAVYYCVRHGNFGNSYISYWAYWGQGTLVTVSSGGGGSGGGGSGGGGSQTVVTQEPSLTVSPGGTVTLTCGSSTGAVTSGNYPNWVQQKPGQAPRGLIGGTKFLAPGTPARFSGSLLGGKAALTLSGVQPEDEAEYYCVLWYSNRWVFGGGTKLTVL

SEQ ID NO: 501 - protein, 505 aa, Artificial Sequence
  Synthetic peptide
QVQLVQSGAEVKKPGASVKVSCKASGYTFTNYYMHWVRQAPGLGLEWMGIINPSDASTSYAQKFQGRVTMTRDTSTNTVYMDLSSLRSEDTAVYYCARGGNSAFYSYYDMDVWGQGTTVTVSSGGGGSGGGGSGGGGSDVVMTQTPLSLPVTLGQPASISCRSSQSLVYRDGNTYLSWFQQRPGQSPRRLIYKVSNWQSGVPDRFSGGGSGTDFTLKISRVEAEDVGVYYCMQGTHWPPTFGQGTKVEIKSGGGGSEVQLVESGGGLVQPGGSLKLSCAASGFTFNKYAMNWVRQAPGKGLEWVARIRSKYNNYATYYADSVKDRFTISRDDSKNTAYLQMNNLKTEDTAVYYCVRHGNFGNSYISYWAYWGQGTLVTVSSGGGGSGGGGSGGGGSQTVVTQEPSLTVSPGGTVTLTCGSSTGAVTSGNYPNWVQQKPGQAPRGLIGGTKFLAPGTPARFSGSLLGGKAALTLSGVQPEDEAEYYCVLWYSNRWVFGGGTKLTVL

SEQ ID NO: 502 - protein, 505 aa, Artificial Sequence
  Synthetic peptide
QVQLVQSGAEVKKPGASVKVSCKASGYTFTNYYMHWVRQAPGQGLEWMGIINPSDGSTSYAQKFQGRVTMTRDTSTNTVYMDLSSLRSEDTAVYYCARGGNSAFYSYYDMDVWGQGTTVTVSSGGGGSGGGGSGGGGSDVVMTQTPLSLPVTLGQPASISCRSSQSLVYRDGNTYLSWFQQRPGQSPRRLIYKVSNWQSGVPDRFSGSGSGTDFTLKISRVEAEDVGVYYCMQGTHWPPTFGQGTKVEIKSGGGGSEVQLVESGGGLVQPGGSLKLSCAASGFTFNKYAMNWVRQAPGKGLEWVARIRSKYNNYATYYADSVKDRFTISRDDSKNTAYLQMNNLKTEDTAVYYCVRHGNFGNSYISYWAYWGQGTLVTVSSGGGGSGGGGSGGGGSQTVVTQEPSLTVSPGGTVTLTCGSSTGAVTSGNYPNWVQQKPGQAPRGLIGGTKFLAPGTPARFSGSLLGGKAALTLSGVQPEDEAEYYCVLWYSNRWVFGGGTKLTVL

SEQ ID NO: 503 - protein, 505 aa, Artificial Sequence
  Synthetic peptide
QVQLVQSGAEVKKPGASVKVSCKASGYTFTNYYMHWVRQAPGQGLEWMGIINPSEGSTSYAQKFQGRVTMTRDTSTNTVYMDLSSLRSEDTAVYYCARGGNSAFYSYYDMDVWGQGTTVTVSSGGGGSGGGGSGGGGSDVVMTQTPLSLPVTLGQPASISCRSSQSLVYREGNTYLSWFQQRPGQSPRRLIYKVSNWQSGVPDRFSGSGSGTDFTLKISRVEAEDVGVYYCMQGTHWPPTFGQGTKVEIKSGGGGSEVQLVESGGGLVQPGGSLKLSCAASGFTFNKYAMNWVRQAPGKGLEWVARIRSKYNNYATYYADSVKDRFTISRDDSKNTAYLQMNNLKTEDTAVYYCVRHGNFGNSYISYWAYWGQGTLVTVSSGGGGSGGGGSGGGGSQTVVTQEPSLTVSPGGTVTLTCGSSTGAVTSGNYPNWVQQKPGQAPRGLIGGTKFLAPGTPARFSGSLLGGKAALTLSGVQPEDEAEYYCVLWYSNRWVFGGGTKLTVL

SEQ ID NO: 504 - protein, 505 aa, Artificial Sequence
  Synthetic peptide
QVQLVQSGAEVKKPGASVKVSCKASGYTFTNYYMHWVRQAPGQGLEWMGIINPSDASTSYAQKFQGRVTMTRDTSTNTVYMDLSSLRSEDTAVYYCARGGNSAFYSYYDMDVWGQGTTVTVSSGGGGSGGGGSGGGGSDVVMTQTPLSLPVTLGQPASISCRSSQSLVYRDANTYLSWFQQRPGQSPRRLIYKVSNWQSGVPDRFSGSGSGTDFTLKISRVEAEDVGVYYCMQGTHWPPTFGQGTKVEIKSGGGGSEVQLVESGGGLVQPGGSLKLSCAASGFTFNKYAMNWVRQAPGKGLEWVARIRSKYNNYATYYADSVKDRFTISRDDSKNTAYLQMNNLKTEDTAVYYCVRHGNFGNSYISYWAYWGQGTLVTVSSGGGGSGGGGSGGGGSQTVVTQEPSLTVSPGGTVTLTCGSSTGAVTSGNYPNWVQQKPGQAPRGLIGGTKFLAPGTPARFSGSLLGGKAALTLSGVQPEDEAEYYCVLWYSNRWVFGGGTKLTVL

SEQ ID NO: 505 - protein, 505 aa, Artificial Sequence
  Synthetic peptide
QVQLVQSGAEVKKPGASVKVSCKASGYTFTNYYMHWVRQAPGLCLEWMGIINPSDGSTSYAQKFQGRVTMTRDTSTNTVYMDLSSLRSEDTAVYYCARGGNSAFYSYYDMDVWGQGTTVTVSSGGGGSGGGGSGGGGSDVVMTQTPLSLPVTLGQPASISCRSSQSLVYRDGNTYLSWFQQRPGQSPRRLIYKVSNWQSGVPDRFSGGGSGTDFTLKISRVEAEDVGVYYCMQGTHWPPTFGCGTKVEIKSGGGGSEVQLVESGGGLVQPGGSLKLSCAASGFTFNKYAMNWVRQAPGKGLEWVARIRSKYNNYATYYADSVKDRFTISRDDSKNTAYLQMNNLKTEDTAVYYCVRHGNFGNSYISYWAYWGQGTLVTVSSGGGGSGGGGSGGGGSQTVVTQEPSLTVSPGGTVTLTCGSSTGAVTSGNYPNWVQQKPGQAPRGLIGGTKFLAPGTPARFSGSLLGGKAALTLSGVQPEDEAEYYCVLWYSNRWVFGGGTKLTVL

SEQ ID NO: 506 - protein, 505 aa, Artificial Sequence
  Synthetic peptide
QVQLVQSGAEVKKPGASVKVSCKASGYTFTNYYMHWVRQAPGLCLEWMGIINPSDGSTSYAQKFQGRVTMTRDTSTNTVYMDLSSLRSEDTAVYYCARGGNSAFYSYYDMDVWGQGTTVTVSSGGGGSGGGGSGGGGSDVVMTQTPLSLPVTLGQPASISCRSSQSLVYREGNTYLSWFQQRPGQSPRRLIYKVSNWQSGVPDRFSGGGSGTDFTLKISRVEAEDVGVYYCMQGTHWPPTFGCGTKVEIKSGGGGSEVQLVESGGGLVQPGGSLKLSCAASGFTFNKYAMNWVRQAPGKGLEWVARIRSKYNNYATYYADSVKDRFTISRDDSKNTAYLQMNNLKTEDTAVYYCVRHGNFGNSYISYWAYWGQGTLVTVSSGGGGSGGGGSGGGGSQTVVTQEPSLTVSPGGTVTLTCGSSTGAVTSGNYPNWVQQKPGQAPRGLIGGTKFLAPGTPARFSGSLLGGKAALTLSGVQPEDEAEYYCVLWYSNRWVFGGGTKLTVL

SEQ ID NO: 507 - protein, 505 aa, Artificial Sequence
  Synthetic peptide
QVQLVQSGAEVKKPGASVKVSCKASGYTFTNYYMHWVRQAPGLCLEWMGIINPSDGSTSYAQKFQGRVTMTRDTSTNTVYMDLSSLRSEDTAVYYCARGGNSAFYSYYDMDVWGQGTTVTVSSGGGGSGGGGSGGGGSDVVMTQTPLSLPVTLGQPASISCRSSQSLVYRDANTYLSWFQQRPGQSPRRLIYKVSNWQSGVPDRFSGGGSGTDFTLKISRVEAEDVGVYYCMQGTHWPPTFGCGTKVEIKSGGGGSEVQLVESGGGLVQPGGSLKLSCAASGFTFNKYAMNWVRQAPGKGLEWVARIRSKYNNYATYYADSVKDRFTISRDDSKNTAYLQMNNLKTEDTAVYYCVRHGNFGNSYISYWAYWGQGTLVTVSSGGGGSGGGGSGGGGSQTVVTQEPSLTVSPGGTVTLTCGSSTGAVTSGNYPNWVQQKPGQAPRGLIGGTKFLAPGTPARFSGSLLGGKAALTLSGVQPEDEAEYYCVLWYSNRWVFGGGTKLTVL

SEQ ID NO: 508 - protein, 505 aa, Artificial Sequence
  Synthetic peptide
QVQLVQSGAEVKKPGASVKVSCKASGYTFTNYYMHWVRQAPGLCLEWMGIINPSDGSTSYAQKFQGRVTMTRDTSTNTVYMDLSSLRSEDTAVYYCARGGNSAFYSYYDMDVWGQGTTVTVSSGGGGSGGGGSGGGGSDVVMTQTPLSLPVTLGQPASISCRSSQSLVYRDGQTYLSWFQQRPGQSPRRLIYKVSNWQSGVPDRFSGGGSGTDFTLKISRVEAEDVGVYYCMQGTHWPPTFGCGTKVEIKSGGGGSEVQLVESGGGLVQPGGSLKLSCAASGFTFNKYAMNWVRQAPGKGLEWVARIRSKYNNYATYYADSVKDRFTISRDDSKNTAYLQMNNLKTEDTAVYYCVRHGNFGNSYISYWAYWGQGTLVTVSSGGGGSGGGGSGGGGSQTVVTQEPSLTVSPGGTVTLTCGSSTGAVTSGNYPNWVQQKPGQAPRGLIGGTKFLAPGTPARFSGSLLGGKAALTLSGVQPEDEAEYYCVLWYSNRWVFGGGTKLTVL

SEQ ID NO: 509 - protein, 505 aa, Artificial Sequence
  Synthetic peptide
QVQLVQSGAEVKKPGASVKVSCKASGYTFTNYYMHWVRQAPGLCLEWMGIINPSDGSTSYAQKFQGRVTMTRDTSTNTVYMDLSSLRSEDTAVYYCARGGNSAFYSYYDMDVWGQGTTVTVSSGGGGSGGGGSGGGGSDVVMTQTPLSLPVTLGQPASISCRSSQSLVYRDGNAYLSWFQQRPGQSPRRLIYKVSNWQSGVPDRFSGGGSGTDFTLKISRVEAEDVGVYYCMQGTHWPPTFGCGTKVEIKSGGGGSEVQLVESGGGLVQPGGSLKLSCAASGFTFNKYAMNWVRQAPGKGLEWVARIRSKYNNYATYYADSVKDRFTISRDDSKNTAYLQMNNLKTEDTAVYYCVRHGNFGNSYISYWAYWGQGTLVTVSSGGGGSGGGGSGGGGSQTVVTQEPSLTVSPGGTVTLTCGSSTGAVTSGNYPNWVQQKPGQAPRGLIGGTKFLAPGTPARFSGSLLGGKAALTLSGVQPEDEAEYYCVLWYSNRWVFGGGTKLTVL

SEQ ID NO: 510 - protein, 505 aa, Artificial Sequence
  Synthetic peptide
QVQLVQSGAEVKKPGASVKVSCKASGYTFTNYYMHWVRQAPGLCLEWMGIINPSDGSTSYAQKFQGRVTMTRDTSTNTVYMDLSSLRSEDTAVYYCARGGNSAFYSYYDMDVWGQGTTVTVSSGGGGSGGGGSGGGGSDVVMTQTPLSLPVTLGQPASISCRSSQSLVYRDGNTYLSWFQQRPGQSPRRLIYKVSNWQSGVPDRFSGSGSGTDFTLKISRVEAEDVGVYYCMQGTHWPPTFGCGTKVEIKSGGGGSEVQLVESGGGLVQPGGSLKLSCAASGFTFNKYAMNWVRQAPGKGLEWVARIRSKYNNYATYYADSVKDRFTISRDDSKNTAYLQMNNLKTEDTAVYYCVRHGNFGNSYISYWAYWGQGTLVTVSSGGGGSGGGGSGGGGSQTVVTQEPSLTVSPGGTVTLTCGSSTGAVTSGNYPNWVQQKPGQAPRGLIGGTKFLAPGTPARFSGSLLGGKAALTLSGVQPEDEAEYYCVLWYSNRWVFGGGTKLTVL

SEQ ID NO: 511 - protein, 505 aa, Artificial Sequence
  Synthetic peptide
QVQLVQSGAEVKKPGASVKVSCKASGYTFTNYYMHWVRQAPGQCLEWMGIINPSDGSTSYAQKFQGRVTMTRDTSTNTVYMDLSSLRSEDTAVYYCARGGNSAFYSYYDMDVWGQGTTVTVSSGGGGSGGGGSGGGGSDVVMTQTPLSLPVTLGQPASISCRSSQSLVYRDGNTYLSWFQQRPGQSPRRLIYKVSNWQSGVPDRFSGGGSGTDFTLKISRVEAEDVGVYYCMQGTHWPPTFGCGTKVEIKSGGGGSEVQLVESGGGLVQPGGSLKLSCAASGFTFNKYAMNWVRQAPGKGLEWVARIRSKYNNYATYYADSVKDRFTISRDDSKNTAYLQMNNLKTEDTAVYYCVRHGNFGNSYISYWAYWGQGTLVTVSSGGGGSGGGGSGGGGSQTVVTQEPSLTVSPGGTVTLTCGSSTGAVTSGNYPNWVQQKPGQAPRGLIGGTKFLAPGTPARFSGSLLGGKAALTLSGVQPEDEAEYYCVLWYSNRWVFGGGTKLTVL

SEQ ID NO: 512 - protein, 505 aa, Artificial Sequence
  Synthetic peptide
QVQLVQSGAEVKKPGASVKVSCKASGYTFTNYYMHWVRQAPGLCLEWMGIINPSEGSTSYAQKFQGRVTMTRDTSTNTVYMDLSSLRSEDTAVYYCARGGNSAFYSYYDMDVWGQGTTVTVSSGGGGSGGGGSGGGGSDVVMTQTPLSLPVTLGQPASISCRSSQSLVYRDGNTYLSWFQQRPGQSPRRLIYKVSNWQSGVPDRFSGGGSGTDFTLKISRVEAEDVGVYYCMQGTHWPPTFGCGTKVEIKSGGGGSEVQLVESGGGLVQPGGSLKLSCAASGFTFNKYAMNWVRQAPGKGLEWVARIRSKYNNYATYYADSVKDRFTISRDDSKNTAYLQMNNLKTEDTAVYYCVRHGNFGNSYISYWAYWGQGTLVTVSSGGGGSGGGGSGGGGSQTVVTQEPSLTVSPGGTVTLTCGSSTGAVTSGNYPNWVQQKPGQAPRGLIGGTKFLAPGTPARFSGSLLGGKAALTLSGVQPEDEAEYYCVLWYSNRWVFGGGTKLTVL

SEQ ID NO: 513 - protein, 505 aa, Artificial Sequence
  Synthetic peptide
QVQLVQSGAEVKKPGASVKVSCKASGYTFTNYYMHWVRQAPGLCLEWMGIINPSDASTSYAQKFQGRVTMTRDTSTNTVYMDLSSLRSEDTAVYYCARGGNSAFYSYYDMDVWGQGTTVTVSSGGGGSGGGGSGGGGSDVVMTQTPLSLPVTLGQPASISCRSSQSLVYRDGNTYLSWFQQRPGQSPRRLIYKVSNWQSGVPDRFSGGGSGTDFTLKISRVEAEDVGVYYCMQGTHWPPTFGCGTKVEIKSGGGGSEVQLVESGGGLVQPGGSLKLSCAASGFTFNKYAMNWVRQAPGKGLEWVARIRSKYNNYATYYADSVKDRFTISRDDSKNTAYLQMNNLKTEDTAVYYCVRHGNFGNSYISYWAYWGQGTLVTVSSGGGGSGGGGSGGGGSQTVVTQEPSLTVSPGGTVTLTCGSSTGAVTSGNYPNWVQQKPGQAPRGLIGGTKFLAPGTPARFSGSLLGGKAALTLSGVQPEDEAEYYCVLWYSNRWVFGGGTKLTVL

SEQ ID NO: 514 - protein, 505 aa, Artificial Sequence
  Synthetic peptide
QVQLVQSGAEVKKPGASVKVSCKASGYTFTNYYMHWVRQAPGQCLEWMGIINPSDGSTSYAQKFQGRVTMTRDTSTNTVYMDLSSLRSEDTAVYYCARGGNSAFYSYYDMDVWGQGTTVTVSSGGGGSGGGGSGGGGSDVVMTQTPLSLPVTLGQPASISCRSSQSLVYRDGNTYLSWFQQRPGQSPRRLIYKVSNWQSGVPDRFSGSGSGTDFTLKISRVEAEDVGVYYCMQGTHWPPTFGCGTKVEIKSGGGGSEVQLVESGGGLVQPGGSLKLSCAASGFTFNKYAMNWVRQAPGKGLEWVARIRSKYNNYATYYADSVKDRFTISRDDSKNTAYLQMNNLKTEDTAVYYCVRHGNFGNSYISYWAYWGQGTLVTVSSGGGGSGGGGSGGGGSQTVVTQEPSLTVSPGGTVTLTCGSSTGAVTSGNYPNWVQQKPGQAPRGLIGGTKFLAPGTPARFSGSLLGGKAALTLSGVQPEDEAEYYCVLWYSNRWVFGGGTKLTVL

SEQ ID NO: 515 - protein, 505 aa, Artificial Sequence
  Synthetic peptide
QVQLVQSGAEVKKPGASVKVSCKASGYTFTNYYMHWVRQAPGQCLEWMGIINPSEGSTSYAQKFQGRVTMTRDTSTNTVYMDLSSLRSEDTAVYYCARGGNSAFYSYYDMDVWGQGTTVTVSSGGGGSGGGGSGGGGSDVVMTQTPLSLPVTLGQPASISCRSSQSLVYREGNTYLSWFQQRPGQSPRRLIYKVSNWQSGVPDRFSGSGSGTDFTLKISRVEAEDVGVYYCMQGTHWPPTFGCGTKVEIKSGGGGSEVQLVESGGGLVQPGGSLKLSCAASGFTFNKYAMNWVRQAPGKGLEWVARIRSKYNNYATYYADSVKDRFTISRDDSKNTAYLQMNNLKTEDTAVYYCVRHGNFGNSYISYWAYWGQGTLVTVSSGGGGSGGGGSGGGGSQTVVTQEPSLTVSPGGTVTLTCGSSTGAVTSGNYPNWVQQKPGQAPRGLIGGTKFLAPGTPARFSGSLLGGKAALTLSGVQPEDEAEYYCVLWYSNRWVFGGGTKLTVL

SEQ ID NO: 516 - protein, 505 aa, Artificial Sequence
  Synthetic peptide
QVQLVQSGAEVKKPGASVKVSCKASGYTFTNYYMHWVRQAPGQCLEWMGIINPSDASTSYAQKFQGRVTMTRDTSTNTVYMDLSSLRSEDTAVYYCARGGNSAFYSYYDMDVWGQGTTVTVSSGGGGSGGGGSGGGGSDVVMTQTPLSLPVTLGQPASISCRSSQSLVYRDANTYLSWFQQRPGQSPRRLIYKVSNWQSGVPDRFSGSGSGTDFTLKISRVEAEDVGVYYCMQGTHWPPTFGCGTKVEIKSGGGGSEVQLVESGGGLVQPGGSLKLSCAASGFTFNKYAMNWVRQAPGKGLEWVARIRSKYNNYATYYADSVKDRFTISRDDSKNTAYLQMNNLKTEDTAVYYCVRHGNFGNSYISYWAYWGQGTLVTVSSGGGGSGGGGSGGGGSQTVVTQEPSLTVSPGGTVTLTCGSSTGAVTSGNYPNWVQQKPGQAPRGLIGGTKFLAPGTPARFSGSLLGGKAALTLSGVQPEDEAEYYCVLWYSNRWVFGGGTKLTVL

SEQ ID NO: 517 - protein, 984 aa, Artificial Sequence
  Synthetic peptide
QVQLQESGPGLVKPSETLSLTCTVSGGSISSYYWSWIRQPPGKGLEWIGYVYYSGTTNYNPSLKSRVTISVDTSKNQFSLKLSSVTAADTAVYYCASIAVTGFYFDYWGQGTLVTVSSGGGGSGGGGSGGGGSEIVLTQSPGTLSLSPGERVTLSCRASQRVNNNYLAWYQQRPGQAPRLLIYGASSRATGIPDRFSGSGSGTDFTLTISRLEPEDFAVYYCQQYDRSPLTFGGGTKLEIKSGGGGSEVQLVESGGGLVQPGGSLKLSCAASGFTFNKYAMNWVRQAPGKGLEWVARIRSKYNNYATYYADSVKDRFTISRDDSKNTAYLQMNNLKTEDTAVYYCVRHGNFGNSYISYWAYWGQGTLVTVSSGGGGSGGGGSGGGGSQTVVTQEPSLTVSPGGTVTLTCGSSTGAVTSGNYPNWVQQKPGQAPRGLIGGTKFLAPGTPARFSGSLLGGKAALTLSGVQPEDEAEYYCVLWYSNRWVFGGGTKLTVLGGGGDKTHTCPPCPAPELLGGPSVFLFPPKPKDTLMISRTPEVTCVVVDVSHEDPEVKFNWYVDGVEVHNAKTKPCEEQYGSTYRCVSVLTVLHQDWLNGKEYKCKVSNKALPAPIEKTISKAKGQPREPQVYTLPPSREEMTKNQVSLTCLVKGFYPSDIAVEWESNGQPENNYKTTPPVLDSDGSFFLYSKLTVDKSRWQQGNVFSCSVMHEALHNHYTQKSLSLSPGKGGGGSGGGGSGGGGSGGGGSGGGGSGGGGSDKTHTCPPCPAPELLGGPSVFLFPPKPKDTLMISRTPEVTCVVVDVSHEDPEVKFNWYVDGVEVHNAKTKPCEEQYGSTYRCVSVLTVLHQDWLNGKEYKCKVSNKALPAPIEKTISKAKGQPREPQVYTLPPSREEMTKNQVSLTCLVKGFYPSDIAVEWESNGQPENNYKTTPPVLDSDGSFFLYSKLTVDKSRWQQGNVFSCSVMHEALHNHYTQKSLSLSPGK

SEQ ID NO: 518 - protein, 982 aa, Artificial Sequence
  Synthetic peptide
QVQLQESGPGLVKPSETLSLTCTVSGGSISSYYWSWIRQPPGKGLEWIGYVYYSGTTNYNPSLKSRVTISVDTSKNQFSLKLSSVTAADTAVYYCASIAVTGFYFDYWGQGTLVTVSSGGGGSGGGGSGGGGSEIVLTQSPGTLSLSPGERVTLSCRASQRVNNNYLAWYQQRPGQAPRLLIYGASSRATGIPDRFSGSGSGTDFTLTISRLEPEDFAVYYCQQYDRSPLTFGGGTKLEIKSGGGGSEVQLVESGGGLVQPGGSLKLSCAASGFTFNKYAMNWVRQAPGKGLEWVARIRSKYNNYATYYADSVKDRFTISRDDSKNTAYLQMNNLKTEDTAVYYCVRHGNFGNSYISYWAYWGQGTLVTVSSGGGGSGGGGSGGGGSQTVVTQEPSLTVSPGGTVTLTCGSSTGAVTSGNYPNWVQQKPGQAPRGLIGGTKFLAPGTPARFSGSLLGGKAALTLSGVQPEDEAEYYCVLWYSNRWVFGGGTKLTVLGGGGDKTHTCPPCPAPELLGGPSVFLFPPKPKDTLMISRTPEVTCVVVDVSHEDPEVKFNWYVDGVEVHNAKTKPCEEQYGSTYRCVSVLTVLHQDWLNGKEYKCKVSNKALPAPIEKTISKAKGQPREPQVYTLPPSREEMTKNQVSLTCLVKGFYPSDIAVEWESNGQPENNYKTTPPVLDSDGSFFLYSKLTVDKSRWQQGNVFSCSVMHEALHNHYTQKSLSLSPGGGGSGGGGSGGGGSGGGGSGGGGSGGGGSDKTHTCPPCPAPELLGGPSVFLFPPKPKDTLMISRTPEVTCVVVDVSHEDPEVKFNWYVDGVEVHNAKTKPCEEQYGSTYRCVSVLTVLHQDWLNGKEYKCKVSNKALPAPIEKTISKAKGQPREPQVYTLPPSREEMTKNQVSLTCLVKGFYPSDIAVEWESNGQPENNYKTTPPVLDSDGSFFLYSKLTVDKSRWQQGNVFSCSVMHEALHNHYTQKSLSLSPGK

SEQ ID NO: 519 - protein, 984 aa, Artificial Sequence
  Synthetic peptide
QVQLQESGPGLVKPSETLSLTCTVSGGSISSYYWSWIRQPPGKCLEWIGYVYYSGTTNYNPSLKSRVTISVDTSKNQFSLKLSSVTAADTAVYYCASIAVTGFYFDYWGQGTLVTVSSGGGGSGGGGSGGGGSEIVLTQSPGTLSLSPGERVTLSCRASQRVNNNYLAWYQQRPGQAPRLLIYGASSRATGIPDRFSGSGSGTDFTLTISRLEPEDFAVYYCQQYDRSPLTFGCGTKLEIKSGGGGSEVQLVESGGGLVQPGGSLKLSCAASGFTFNKYAMNWVRQAPGKGLEWVARIRSKYNNYATYYADSVKDRFTISRDDSKNTAYLQMNNLKTEDTAVYYCVRHGNFGNSYISYWAYWGQGTLVTVSSGGGGSGGGGSGGGGSQTVVTQEPSLTVSPGGTVTLTCGSSTGAVTSGNYPNWVQQKPGQAPRGLIGGTKFLAPGTPARFSGSLLGGKAALTLSGVQPEDEAEYYCVLWYSNRWVFGGGTKLTVLGGGGDKTHTCPPCPAPELLGGPSVFLFPPKPKDTLMISRTPEVTCVVVDVSHEDPEVKFNWYVDGVEVHNAKTKPCEEQYGSTYRCVSVLTVLHQDWLNGKEYKCKVSNKALPAPIEKTISKAKGQPREPQVYTLPPSREEMTKNQVSLTCLVKGFYPSDIAVEWESNGQPENNYKTTPPVLDSDGSFFLYSKLTVDKSRWQQGNVFSCSVMHEALHNHYTQKSLSLSPGKGGGGSGGGGSGGGGSGGGGSGGGGSGGGGSDKTHTCPPCPAPELLGGPSVFLFPPKPKDTLMISRTPEVTCVVVDVSHEDPEVKFNWYVDGVEVHNAKTKPCEEQYGSTYRCVSVLTVLHQDWLNGKEYKCKVSNKALPAPIEKTISKAKGQPREPQVYTLPPSREEMTKNQVSLTCLVKGFYPSDIAVEWESNGQPENNYKTTPPVLDSDGSFFLYSKLTVDKSRWQQGNVFSCSVMHEALHNHYTQKSLSLSPGK

SEQ ID NO: 520 - protein, 982 aa, Artificial Sequence
  Synthetic peptide
QVQLQESGPGLVKPSETLSLTCTVSGGSISSYYWSWIRQPPGKCLEWIGYVYYSGTTNYNPSLKSRVTISVDTSKNQFSLKLSSVTAADTAVYYCASIAVTGFYFDYWGQGTLVTVSSGGGGSGGGGSGGGGSEIVLTQSPGTLSLSPGERVTLSCRASQRVNNNYLAWYQQRPGQAPRLLIYGASSRATGIPDRFSGSGSGTDFTLTISRLEPEDFAVYYCQQYDRSPLTFGCGTKLEIKSGGGGSEVQLVESGGGLVQPGGSLKLSCAASGFTFNKYAMNWVRQAPGKGLEWVARIRSKYNNYATYYADSVKDRFTISRDDSKNTAYLQMNNLKTEDTAVYYCVRHGNFGNSYISYWAYWGQGTLVTVSSGGGGSGGGGSGGGGSQTVVTQEPSLTVSPGGTVTLTCGSSTGAVTSGNYPNWVQQKPGQAPRGLIGGTKFLAPGTPARFSGSLLGGKAALTLSGVQPEDEAEYYCVLWYSNRWVFGGGTKLTVLGGGGDKTHTCPPCPAPELLGGPSVFLFPPKPKDTLMISRTPEVTCVVVDVSHEDPEVKFNWYVDGVEVHNAKTKPCEEQYGSTYRCVSVLTVLHQDWLNGKEYKCKVSNKALPAPIEKTISKAKGQPREPQVYTLPPSREEMTKNQVSLTCLVKGFYPSDIAVEWESNGQPENNYKTTPPVLDSDGSFFLYSKLTVDKSRWQQGNVFSCSVMHEALHNHYTQKSLSLSPGGGGSGGGGSGGGGSGGGGSGGGGSGGGGSDKTHTCPPCPAPELLGGPSVFLFPPKPKDTLMISRTPEVTCVVVDVSHEDPEVKFNWYVDGVEVHNAKTKPCEEQYGSTYRCVSVLTVLHQDWLNGKEYKCKVSNKALPAPIEKTISKAKGQPREPQVYTLPPSREEMTKNQVSLTCLVKGFYPSDIAVEWESNGQPENNYKTTPPVLDSDGSFFLYSKLTVDKSRWQQGNVFSCSVMHEALHNHYTQKSLSLSPGK

SEQ ID NO: 521 - protein, 984 aa, Artificial Sequence
  Synthetic peptide
QVQLQESGPGLVKPSETLSLTCTVSGASISSFYWSWIRQPPGKGLEWIGYIYYSGTTNYNPSLKSRVTISVDTSKNQFSLKLSSVTAADTAVYYCARIAVAGFFFDYWGQGTLVTVSSGGGGSGGGGSGGGGSEIVLTQSPGTLSLSPGERATLSCRASQSVNKNYLAWYQQKPGQAPRLLIYGASSRATGIPDRFSGSGSGTDFTLTISRLEPEDFAVYYCQQYDRSPLTFGGGTKVEIKSGGGGSEVQLVESGGGLVQPGGSLKLSCAASGFTFNKYAMNWVRQAPGKGLEWVARIRSKYNNYATYYADSVKDRFTISRDDSKNTAYLQMNNLKTEDTAVYYCVRHGNFGNSYISYWAYWGQGTLVTVSSGGGGSGGGGSGGGGSQTVVTQEPSLTVSPGGTVTLTCGSSTGAVTSGNYPNWVQQKPGQAPRGLIGGTKFLAPGTPARFSGSLLGGKAALTLSGVQPEDEAEYYCVLWYSNRWVFGGGTKLTVLGGGGDKTHTCPPCPAPELLGGPSVFLFPPKPKDTLMISRTPEVTCVVVDVSHEDPEVKFNWYVDGVEVHNAKTKPCEEQYGSTYRCVSVLTVLHQDWLNGKEYKCKVSNKALPAPIEKTISKAKGQPREPQVYTLPPSREEMTKNQVSLTCLVKGFYPSDIAVEWESNGQPENNYKTTPPVLDSDGSFFLYSKLTVDKSRWQQGNVFSCSVMHEALHNHYTQKSLSLSPGKGGGGSGGGGSGGGGSGGGGSGGGGSGGGGSDKTHTCPPCPAPELLGGPSVFLFPPKPKDTLMISRTPEVTCVVVDVSHEDPEVKFNWYVDGVEVHNAKTKPCEEQYGSTYRCVSVLTVLHQDWLNGKEYKCKVSNKALPAPIEKTISKAKGQPREPQVYTLPPSREEMTKNQVSLTCLVKGFYPSDIAVEWESNGQPENNYKTTPPVLDSDGSFFLYSKLTVDKSRWQQGNVFSCSVMHEALHNHYTQKSLSLSPGK

SEQ ID NO: 522 - protein, 982 aa, Artificial Sequence
  Synthetic peptide
QVQLQESGPGLVKPSETLSLTCTVSGASISSFYWSWIRQPPGKGLEWIGYIYYSGTTNYNPSLKSRVTISVDTSKNQFSLKLSSVTAADTAVYYCARIAVAGFFFDYWGQGTLVTVSSGGGGSGGGGSGGGGSEIVLTQSPGTLSLSPGERATLSCRASQSVNKNYLAWYQQKPGQAPRLLIYGASSRATGIPDRFSGSGSGTDFTLTISRLEPEDFAVYYCQQYDRSPLTFGGGTKVEIKSGGGGSEVQLVESGGGLVQPGGSLKLSCAASGFTFNKYAMNWVRQAPGKGLEWVARIRSKYNNYATYYADSVKDRFTISRDDSKNTAYLQMNNLKTEDTAVYYCVRHGNFGNSYISYWAYWGQGTLVTVSSGGGGSGGGGSGGGGSQTVVTQEPSLTVSPGGTVTLTCGSSTGAVTSGNYPNWVQQKPGQAPRGLIGGTKFLAPGTPARFSGSLLGGKAALTLSGVQPEDEAEYYCVLWYSNRWVFGGGTKLTVLGGGGDKTHTCPPCPAPELLGGPSVFLFPPKPKDTLMISRTPEVTCVVVDVSHEDPEVKFNWYVDGVEVHNAKTKPCEEQYGSTYRCVSVLTVLHQDWLNGKEYKCKVSNKALPAPIEKTISKAKGQPREPQVYTLPPSREEMTKNQVSLTCLVKGFYPSDIAVEWESNGQPENNYKTTPPVLDSDGSFFLYSKLTVDKSRWQQGNVFSCSVMHEALHNHYTQKSLSLSPGGGGSGGGGSGGGGSGGGGSGGGGSGGGGSDKTHTCPPCPAPELLGGPSVFLFPPKPKDTLMISRTPEVTCVVVDVSHEDPEVKFNWYVDGVEVHNAKTKPCEEQYGSTYRCVSVLTVLHQDWLNGKEYKCKVSNKALPAPIEKTISKAKGQPREPQVYTLPPSREEMTKNQVSLTCLVKGFYPSDIAVEWESNGQPENNYKTTPPVLDSDGSFFLYSKLTVDKSRWQQGNVFSCSVMHEALHNHYTQKSLSLSPGK

SEQ ID NO: 523 - protein, 984 aa, Artificial Sequence
  Synthetic peptide
QVQLQESGPGLVKPSETLSLTCTVSGASISSFYWSWIRQPPGKCLEWIGYIYYSGTTNYNPSLKSRVTISVDTSKNQFSLKLSSVTAADTAVYYCARIAVAGFFFDYWGQGTLVTVSSGGGGSGGGGSGGGGSEIVLTQSPGTLSLSPGERATLSCRASQSVNKNYLAWYQQKPGQAPRLLIYGASSRATGIPDRFSGSGSGTDFTLTISRLEPEDFAVYYCQQYDRSPLTFGCGTKVEIKSGGGGSEVQLVESGGGLVQPGGSLKLSCAASGFTFNKYAMNWVRQAPGKGLEWVARIRSKYNNYATYYADSVKDRFTISRDDSKNTAYLQMNNLKTEDTAVYYCVRHGNFGNSYISYWAYWGQGTLVTVSSGGGGSGGGGSGGGGSQTVVTQEPSLTVSPGGTVTLTCGSSTGAVTSGNYPNWVQQKPGQAPRGLIGGTKFLAPGTPARFSGSLLGGKAALTLSGVQPEDEAEYYCVLWYSNRWVFGGGTKLTVLGGGGDKTHTCPPCPAPELLGGPSVFLFPPKPKDTLMISRTPEVTCVVVDVSHEDPEVKFNWYVDGVEVHNAKTKPCEEQYGSTYRCVSVLTVLHQDWLNGKEYKCKVSNKALPAPIEKTISKAKGQPREPQVYTLPPSREEMTKNQVSLTCLVKGFYPSDIAVEWESNGQPENNYKTTPPVLDSDGSFFLYSKLTVDKSRWQQGNVFSCSVMHEALHNHYTQKSLSLSPGKGGGGSGGGGSGGGGSGGGGSGGGGSGGGGSDKTHTCPPCPAPELLGGPSVFLFPPKPKDTLMISRTPEVTCVVVDVSHEDPEVKFNWYVDGVEVHNAKTKPCEEQYGSTYRCVSVLTVLHQDWLNGKEYKCKVSNKALPAPIEKTISKAKGQPREPQVYTLPPSREEMTKNQVSLTCLVKGFYPSDIAVEWESNGQPENNYKTTPPVLDSDGSFFLYSKLTVDKSRWQQGNVFSCSVMHEALHNHYTQKSLSLSPGK

SEQ ID NO: 524 - protein, 982 aa, Artificial Sequence
  Synthetic peptide
QVQLQESGPGLVKPSETLSLTCTVSGASISSFYWSWIRQPPGKCLEWIGYIYYSGTTNYNPSLKSRVTISVDTSKNQFSLKLSSVTAADTAVYYCARIAVAGFFFDYWGQGTLVTVSSGGGGSGGGGSGGGGSEIVLTQSPGTLSLSPGERATLSCRASQSVNKNYLAWYQQKPGQAPRLLIYGASSRATGIPDRFSGSGSGTDFTLTISRLEPEDFAVYYCQQYDRSPLTFGCGTKVEIKSGGGGSEVQLVESGGGLVQPGGSLKLSCAASGFTFNKYAMNWVRQAPGKGLEWVARIRSKYNNYATYYADSVKDRFTISRDDSKNTAYLQMNNLKTEDTAVYYCVRHGNFGNSYISYWAYWGQGTLVTVSSGGGGSGGGGSGGGGSQTVVTQEPSLTVSPGGTVTLTCGSSTGAVTSGNYPNWVQQKPGQAPRGLIGGTKFLAPGTPARFSGSLLGGKAALTLSGVQPEDEAEYYCVLWYSNRWVFGGGTKLTVLGGGGDKTHTCPPCPAPELLGGPSVFLFPPKPKDTLMISRTPEVTCVVVDVSHEDPEVKFNWYVDGVEVHNAKTKPCEEQYGSTYRCVSVLTVLHQDWLNGKEYKCKVSNKALPAPIEKTISKAKGQPREPQVYTLPPSREEMTKNQVSLTCLVKGFYPSDIAVEWESNGQPENNYKTTPPVLDSDGSFFLYSKLTVDKSRWQQGNVFSCSVMHEALHNHYTQKSLSLSPGGGGSGGGGSGGGGSGGGGSGGGGSGGGGSDKTHTCPPCPAPELLGGPSVFLFPPKPKDTLMISRTPEVTCVVVDVSHEDPEVKFNWYVDGVEVHNAKTKPCEEQYGSTYRCVSVLTVLHQDWLNGKEYKCKVSNKALPAPIEKTISKAKGQPREPQVYTLPPSREEMTKNQVSLTCLVKGFYPSDIAVEWESNGQPENNYKTTPPVLDSDGSFFLYSKLTVDKSRWQQGNVFSCSVMHEALHNHYTQKSLSLSPGK

SEQ ID NO: 525 - protein, 993 aa, Artificial Sequence
  Synthetic peptide
QVQLVQSGAEVKKPGASVKVSCKASGYTFTNYYMHWVRQAPGLGLEWMGIINPSDGSTSYAQKFQGRVTMTRDTSTNTVYMDLSSLRSEDTAVYYCARGGNSAFYSYYDMDVWGQGTTVTVSSGGGGSGGGGSGGGGSDVVMTQTPLSLPVTLGQPASISCRSSQSLVYRDGNTYLSWFQQRPGQSPRRLIYKVSNWQSGVPDRFSGGGSGTDFTLKISRVEAEDVGVYYCMQGTHWPPTFGQGTKVEIKSGGGGSEVQLVESGGGLVQPGGSLKLSCAASGFTFNKYAMNWVRQAPGKGLEWVARIRSKYNNYATYYADSVKDRFTISRDDSKNTAYLQMNNLKTEDTAVYYCVRHGNFGNSYISYWAYWGQGTLVTVSSGGGGSGGGGSGGGGSQTVVTQEPSLTVSPGGTVTLTCGSSTGAVTSGNYPNWVQQKPGQAPRGLIGGTKFLAPGTPARFSGSLLGGKAALTLSGVQPEDEAEYYCVLWYSNRWVFGGGTKLTVLGGGGDKTHTCPPCPAPELLGGPSVFLFPPKPKDTLMISRTPEVTCVVVDVSHEDPEVKFNWYVDGVEVHNAKTKPCEEQYGSTYRCVSVLTVLHQDWLNGKEYKCKVSNKALPAPIEKTISKAKGQPREPQVYTLPPSREEMTKNQVSLTCLVKGFYPSDIAVEWESNGQPENNYKTTPPVLDSDGSFFLYSKLTVDKSRWQQGNVFSCSVMHEALHNHYTQKSLSLSPGKGGGGSGGGGSGGGGSGGGGSGGGGSGGGGSDKTHTCPPCPAPELLGGPSVFLFPPKPKDTLMISRTPEVTCVVVDVSHEDPEVKFNWYVDGVEVHNAKTKPCEEQYGSTYRCVSVLTVLHQDWLNGKEYKCKVSNKALPAPIEKTISKAKGQPREPQVYTLPPSREEMTKNQVSLTCLVKGFYPSDIAVEWESNGQPENNYKTTPPVLDSDGSFFLYSKLTVDKSRWQQGNVFSCSVMHEALHNHYTQKSLSLSPGK

SEQ ID NO: 526 - protein, 991 aa, Artificial Sequence
  Synthetic peptide
QVQLVQSGAEVKKPGASVKVSCKASGYTFTNYYMHWVRQAPGLGLEWMGIINPSDGSTSYAQKFQGRVTMTRDTSTNTVYMDLSSLRSEDTAVYYCARGGNSAFYSYYDMDVWGQGTTVTVSSGGGGSGGGGSGGGGSDVVMTQTPLSLPVTLGQPASISCRSSQSLVYRDGNTYLSWFQQRPGQSPRRLIYKVSNWQSGVPDRFSGGGSGTDFTLKISRVEAEDVGVYYCMQGTHWPPTFGQGTKVEIKSGGGGSEVQLVESGGGLVQPGGSLKLSCAASGFTFNKYAMNWVRQAPGKGLEWVARIRSKYNNYATYYADSVKDRFTISRDDSKNTAYLQMNNLKTEDTAVYYCVRHGNFGNSYISYWAYWGQGTLVTVSSGGGGSGGGGSGGGGSQTVVTQEPSLTVSPGGTVTLTCGSSTGAVTSGNYPNWVQQKPGQAPRGLIGGTKFLAPGTPARFSGSLLGGKAALTLSGVQPEDEAEYYCVLWYSNRWVFGGGTKLTVLGGGGDKTHTCPPCPAPELLGGPSVFLFPPKPKDTLMISRTPEVTCVVVDVSHEDPEVKFNWYVDGVEVHNAKTKPCEEQYGSTYRCVSVLTVLHQDWLNGKEYKCKVSNKALPAPIEKTISKAKGQPREPQVYTLPPSREEMTKNQVSLTCLVKGFYPSDIAVEWESNGQPENNYKTTPPVLDSDGSFFLYSKLTVDKSRWQQGNVFSCSVMHEALHNHYTQKSLSLSPGGGGSGGGGSGGGGSGGGGSGGGGSGGGGSDKTHTCPPCPAPELLGGPSVFLFPPKPKDTLMISRTPEVTCVVVDVSHEDPEVKFNWYVDGVEVHNAKTKPCEEQYGSTYRCVSVLTVLHQDWLNGKEYKCKVSNKALPAPIEKTISKAKGQPREPQVYTLPPSREEMTKNQVSLTCLVKGFYPSDIAVEWESNGQPENNYKTTPPVLDSDGSFFLYSKLTVDKSRWQQGNVFSCSVMHEALHNHYTQKSLSLSPGK

SEQ ID NO: 527 - protein, 993 aa, Artificial Sequence
  Synthetic peptide
QVQLVQSGAEVKKPGASVKVSCKASGYTFTNYYMHWVRQAPGLCLEWMGIINPSDGSTSYAQKFQGRVTMTRDTSTNTVYMDLSSLRSEDTAVYYCARGGNSAFYSYYDMDVWGQGTTVTVSSGGGGSGGGGSGGGGSDVVMTQTPLSLPVTLGQPASISCRSSQSLVYRDGNTYLSWFQQRPGQSPRRLIYKVSNWQSGVPDRFSGGGSGTDFTLKISRVEAEDVGVYYCMQGTHWPPTFGCGTKVEIKSGGGGSEVQLVESGGGLVQPGGSLKLSCAASGFTFNKYAMNWVRQAPGKGLEWVARIRSKYNNYATYYADSVKDRFTISRDDSKNTAYLQMNNLKTEDTAVYYCVRHGNFGNSYISYWAYWGQGTLVTVSSGGGGSGGGGSGGGGSQTVVTQEPSLTVSPGGTVTLTCGSSTGAVTSGNYPNWVQQKPGQAPRGLIGGTKFLAPGTPARFSGSLLGGKAALTLSGVQPEDEAEYYCVLWYSNRWVFGGGTKLTVLGGGGDKTHTCPPCPAPELLGGPSVFLFPPKPKDTLMISRTPEVTCVVVDVSHEDPEVKFNWYVDGVEVHNAKTKPCEEQYGSTYRCVSVLTVLHQDWLNGKEYKCKVSNKALPAPIEKTISKAKGQPREPQVYTLPPSREEMTKNQVSLTCLVKGFYPSDIAVEWESNGQPENNYKTTPPVLDSDGSFFLYSKLTVDKSRWQQGNVFSCSVMHEALHNHYTQKSLSLSPGKGGGGSGGGGSGGGGSGGGGSGGGGSGGGGSDKTHTCPPCPAPELLGGPSVFLFPPKPKDTLMISRTPEVTCVVVDVSHEDPEVKFNWYVDGVEVHNAKTKPCEEQYGSTYRCVSVLTVLHQDWLNGKEYKCKVSNKALPAPIEKTISKAKGQPREPQVYTLPPSREEMTKNQVSLTCLVKGFYPSDIAVEWESNGQPENNYKTTPPVLDSDGSFFLYSKLTVDKSRWQQGNVFSCSVMHEALHNHYTQKSLSLSPGK

SEQ ID NO: 528 - protein, 991 aa, Artificial Sequence
  Synthetic peptide
QVQLVQSGAEVKKPGASVKVSCKASGYTFTNYYMHWVRQAPGLCLEWMGIINPSDGSTSYAQKFQGRVTMTRDTSTNTVYMDLSSLRSEDTAVYYCARGGNSAFYSYYDMDVWGQGTTVTVSSGGGGSGGGGSGGGGSDVVMTQTPLSLPVTLGQPASISCRSSQSLVYRDGNTYLSWFQQRPGQSPRRLIYKVSNWQSGVPDRFSGGGSGTDFTLKISRVEAEDVGVYYCMQGTHWPPTFGCGTKVEIKSGGGGSEVQLVESGGGLVQPGGSLKLSCAASGFTFNKYAMNWVRQAPGKGLEWVARIRSKYNNYATYYADSVKDRFTISRDDSKNTAYLQMNNLKTEDTAVYYCVRHGNFGNSYISYWAYWGQGTLVTVSSGGGGSGGGGSGGGGSQTVVTQEPSLTVSPGGTVTLTCGSSTGAVTSGNYPNWVQQKPGQAPRGLIGGTKFLAPGTPARFSGSLLGGKAALTLSGVQPEDEAEYYCVLWYSNRWVFGGGTKLTVLGGGGDKTHTCPPCPAPELLGGPSVFLFPPKPKDTLMISRTPEVTCVVVDVSHEDPEVKFNWYVDGVEVHNAKTKPCEEQYGSTYRCVSVLTVLHQDWLNGKEYKCKVSNKALPAPIEKTISKAKGQPREPQVYTLPPSREEMTKNQVSLTCLVKGFYPSDIAVEWESNGQPENNYKTTPPVLDSDGSFFLYSKLTVDKSRWQQGNVFSCSVMHEALHNHYTQKSLSLSPGGGGSGGGGSGGGGSGGGGSGGGGSGGGGSDKTHTCPPCPAPELLGGPSVFLFPPKPKDTLMISRTPEVTCVVVDVSHEDPEVKFNWYVDGVEVHNAKTKPCEEQYGSTYRCVSVLTVLHQDWLNGKEYKCKVSNKALPAPIEKTISKAKGQPREPQVYTLPPSREEMTKNQVSLTCLVKGFYPSDIAVEWESNGQPENNYKTTPPVLDSDGSFFLYSKLTVDKSRWQQGNVFSCSVMHEALHNHYTQKSLSLSPGK

SEQ ID NO: 529 - protein, 118 aa, Artificial Sequence
  Synthetic peptide
QVQLQESGPGLVKPSETLSLTCTVSGASISSFYWSWIRQPPGKCLEWIGYIYYSGTTNYNPSLKSRVTISVDTSKNQFSLKLSSVTAADTAVYYCARIAVAGFFFDYWGQGTLVTVSS

SEQ ID NO: 530 - protein, 108 aa, Artificial Sequence
  Synthetic peptide
EIVLTQSPGTLSLSPGERATLSCRASQSVNKNYLAWYQQKPGQAPRLLIYGASSRATGIPDRFSGSGSGTDFTLTISRLEPEDFAVYYCQQYDRSPLTFGCGTKVEIK

SEQ ID NO: 531 - protein, 241 aa, Artificial Sequence
  Synthetic peptide
QVQLQESGPGLVKPSETLSLTCTVSGASISSFYWSWIRQPPGKCLEWIGYIYYSGTTNYNPSLKSRVTISVDTSKNQFSLKLSSVTAADTAVYYCARIAVAGFFFDYWGQGTLVTVSSGGGGSGGGGSGGGGSEIVLTQSPGTLSLSPGERATLSCRASQSVNKNYLAWYQQKPGQAPRLLIYGASSRATGIPDRFSGSGSGTDFTLTISRLEPEDFAVYYCQQYDRSPLTFGCGTKVEIK

SEQ ID NO: 532 - protein, 496 aa, Artificial Sequence
  Synthetic peptide
QVQLQESGPGLVKPSETLSLTCTVSGASISSFYWSWIRQPPGKCLEWIGYIYYSGTTNYNPSLKSRVTISVDTSKNQFSLKLSSVTAADTAVYYCARIAVAGFFFDYWGQGTLVTVSSGGGGSGGGGSGGGGSEIVLTQSPGTLSLSPGERATLSCRASQSVNKNYLAWYQQKPGQAPRLLIYGASSRATGIPDRFSGSGSGTDFTLTISRLEPEDFAVYYCQQYDRSPLTFGCGTKVEIKSGGGGSEVQLVESGGGLVQPGGSLKLSCAASGFTFNKYAMNWVRQAPGKGLEWVARIRSKYNNYATYYADSVKDRFTISRDDSKNTAYLQMNNLKTEDTAVYYCVRHGNFGNSYISYWAYWGQGTLVTVSSGGGGSGGGGSGGGGSQTVVTQEPSLTVSPGGTVTLTCGSSTGAVTSGNYPNWVQQKPGQAPRGLIGGTKFLAPGTPARFSGSLLGGKAALTLSGVQPEDEAEYYCVLWYSNRWVFGGGTKLTVL

SEQ ID NO: 533 - protein, 227 aa, Artificial Sequence
  Synthetic peptide
DKTHTCPPCPAPELLGGPSVFLFPPKPKDTLMISRTPEVTCVVVDVSHEDPEVKFNWYVDGVEVHNAKTKPCEEQYGSTYRCVSVLTVLHQDWLNGKEYKCKVSNKALPAPIEKTISKAKGQPREPQVYTLPPSREEMTKNQVSLTCLVKGFYPSDIAVEWESNGQPENNYKTTPPVLDSDGSFFLYSKLTVDKSRWQQGNVFSCSVMHEALHNHYTQKSLSLSPGK

SEQ ID NO: 534 - protein, 225 aa, Artificial Sequence
  Synthetic peptide
DKTHTCPPCPAPELLGGPSVFLFPPKPKDTLMISRTPEVTCVVVDVSHEDPEVKFNWYVDGVEVHNAKTKPCEEQYGSTYRCVSVLTVLHQDWLNGKEYKCKVSNKALPAPIEKTISKAKGQPREPQVYTLPPSREEMTKNQVSLTCLVKGFYPSDIAVEWESNGQPENNYKTTPPVLDSDGSFFLYSKLTVDKSRWQQGNVFSCSVMHEALHNHYTQKSLSLSP

SEQ ID NO: 535 - protein, 227 aa, Artificial Sequence
  Synthetic peptide
DKTHTCPPCPAPELLGGPSVFLFPPKPKDTLMISRTPEVTCVVVDVSHEDPEVKFNWYVDGVEVHNAKTKPREEQYNSTYRVVSVLTVLHQDWLNGKEYKCKVSNKALPAPIEKTISKAKGQPREPQVYTLPPSREEMTKNQVSLTCLVKGFYPSDIAVEWESNGQPENNYKTTPPVLDSDGSFFLYSKLTVDKSRWQQGNVFSCSVMHEALHNHYTQKSLSLSPGK

SEQ ID NO: 536 - protein, 225 aa, Artificial Sequence
  Synthetic peptide
DKTHTCPPCPAPELLGGPSVFLFPPKPKDTLMISRTPEVTCVVVDVSHEDPEVKFNWYVDGVEVHNAKTKPREEQYNSTYRVVSVLTVLHQDWLNGKEYKCKVSNKALPAPIEKTISKAKGQPREPQVYTLPPSREEMTKNQVSLTCLVKGFYPSDIAVEWESNGQPENNYKTTPPVLDSDGSFFLYSKLTVDKSRWQQGNVFSCSVMHEALHNHYTQKSLSLSP

SEQ ID NO: 537 - protein, 227 aa, Artificial Sequence
  Synthetic peptide
DKTHTCPPCPAPELLGGPSVFLFPPKPKDTLMISRTPEVTCVVVDVSHEDPEVKFNWYVDGVEVHNAKTKPREEQYGSTYRVVSVLTVLHQDWLNGKEYKCKVSNKALPAPIEKTISKAKGQPREPQVYTLPPSREEMTKNQVSLTCLVKGFYPSDIAVEWESNGQPENNYKTTPPVLDSDGSFFLYSKLTVDKSRWQQGNVFSCSVMHEALHNHYTQKSLSLSPGK

SEQ ID NO: 538 - protein, 225 aa, Artificial Sequence
  Synthetic peptide
DKTHTCPPCPAPELLGGPSVFLFPPKPKDTLMISRTPEVTCVVVDVSHEDPEVKFNWYVDGVEVHNAKTKPREEQYGSTYRVVSVLTVLHQDWLNGKEYKCKVSNKALPAPIEKTISKAKGQPREPQVYTLPPSREEMTKNQVSLTCLVKGFYPSDIAVEWESNGQPENNYKTTPPVLDSDGSFFLYSKLTVDKSRWQQGNVFSCSVMHEALHNHYTQKSLSLSP

SEQ ID NO: 539 - protein, 227 aa, Artificial Sequence
  Synthetic peptide
DKTHTCPPCPAPELLGGPSVFLFPPKPKDTLMISRTPEVTCVVVDVSHEDPEVKFNWYVDGVEVHNAKTKPCEEQYNSTYRCVSVLTVLHQDWLNGKEYKCKVSNKALPAPIEKTISKAKGQPREPQVYTLPPSREEMTKNQVSLTCLVKGFYPSDIAVEWESNGQPENNYKTTPPVLDSDGSFFLYSKLTVDKSRWQQGNVFSCSVMHEALHNHYTQKSLSLSPGK

SEQ ID NO: 540 - protein, 225 aa, Artificial Sequence
  Synthetic peptide
DKTHTCPPCPAPELLGGPSVFLFPPKPKDTLMISRTPEVTCVVVDVSHEDPEVKFNWYVDGVEVHNAKTKPCEEQYNSTYRCVSVLTVLHQDWLNGKEYKCKVSNKALPAPIEKTISKAKGQPREPQVYTLPPSREEMTKNQVSLTCLVKGFYPSDIAVEWESNGQPENNYKTTPPVLDSDGSFFLYSKLTVDKSRWQQGNVFSCSVMHEALHNHYTQKSLSLSP

SEQ ID NO: 541 - protein, 484 aa, Artificial Sequence
  Synthetic peptide
DKTHTCPPCPAPELLGGPSVFLFPPKPKDTLMISRTPEVTCVVVDVSHEDPEVKFNWYVDGVEVHNAKTKPCEEQYGSTYRCVSVLTVLHQDWLNGKEYKCKVSNKALPAPIEKTISKAKGQPREPQVYTLPPSREEMTKNQVSLTCLVKGFYPSDIAVEWESNGQPENNYKTTPPVLDSDGSFFLYSKLTVDKSRWQQGNVFSCSVMHEALHNHYTQKSLSLSPGKGGGGSGGGGSGGGGSGGGGSGGGGSGGGGSDKTHTCPPCPAPELLGGPSVFLFPPKPKDTLMISRTPEVTCVVVDVSHEDPEVKFNWYVDGVEVHNAKTKPCEEQYGSTYRCVSVLTVLHQDWLNGKEYKCKVSNKALPAPIEKTISKAKGQPREPQVYTLPPSREEMTKNQVSLTCLVKGFYPSDIAVEWESNGQPENNYKTTPPVLDSDGSFFLYSKLTVDKSRWQQGNVFSCSVMHEALHNHYTQKSLSLSPGK

SEQ ID NO: 542 - protein, 480 aa, Artificial Sequence
  Synthetic peptide
DKTHTCPPCPAPELLGGPSVFLFPPKPKDTLMISRTPEVTCVVVDVSHEDPEVKFNWYVDGVEVHNAKTKPCEEQYGSTYRCVSVLTVLHQDWLNGKEYKCKVSNKALPAPIEKTISKAKGQPREPQVYTLPPSREEMTKNQVSLTCLVKGFYPSDIAVEWESNGQPENNYKTTPPVLDSDGSFFLYSKLTVDKSRWQQGNVFSCSVMHEALHNHYTQKSLSLSPGGGGSGGGGSGGGGSGGGGSGGGGSGGGGSDKTHTCPPCPAPELLGGPSVFLFPPKPKDTLMISRTPEVTCVVVDVSHEDPEVKFNWYVDGVEVHNAKTKPCEEQYGSTYRCVSVLTVLHQDWLNGKEYKCKVSNKALPAPIEKTISKAKGQPREPQVYTLPPSREEMTKNQVSLTCLVKGFYPSDIAVEWESNGQPENNYKTTPPVLDSDGSFFLYSKLTVDKSRWQQGNVFSCSVMHEALHNHYTQKSLSLSP

SEQ ID NO: 543 - protein, 484 aa, Artificial Sequence
  Synthetic peptide
DKTHTCPPCPAPELLGGPSVFLFPPKPKDTLMISRTPEVTCVVVDVSHEDPEVKFNWYVDGVEVHNAKTKPREEQYNSTYRVVSVLTVLHQDWLNGKEYKCKVSNKALPAPIEKTISKAKGQPREPQVYTLPPSREEMTKNQVSLTCLVKGFYPSDIAVEWESNGQPENNYKTTPPVLDSDGSFFLYSKLTVDKSRWQQGNVFSCSVMHEALHNHYTQKSLSLSPGKGGGGSGGGGSGGGGSGGGGSGGGGSGGGGSDKTHTCPPCPAPELLGGPSVFLFPPKPKDTLMISRTPEVTCVVVDVSHEDPEVKFNWYVDGVEVHNAKTKPREEQYNSTYRVVSVLTVLHQDWLNGKEYKCKVSNKALPAPIEKTISKAKGQPREPQVYTLPPSREEMTKNQVSLTCLVKGFYPSDIAVEWESNGQPENNYKTTPPVLDSDGSFFLYSKLTVDKSRWQQGNVFSCSVMHEALHNHYTQKSLSLSPGK

SEQ ID NO: 544 - protein, 480 aa, Artificial Sequence
  Synthetic peptide
DKTHTCPPCPAPELLGGPSVFLFPPKPKDTLMISRTPEVTCVVVDVSHEDPEVKFNWYVDGVEVHNAKTKPREEQYNSTYRVVSVLTVLHQDWLNGKEYKCKVSNKALPAPIEKTISKAKGQPREPQVYTLPPSREEMTKNQVSLTCLVKGFYPSDIAVEWESNGQPENNYKTTPPVLDSDGSFFLYSKLTVDKSRWQQGNVFSCSVMHEALHNHYTQKSLSLSPGGGGSGGGGSGGGGSGGGGSGGGGSGGGGSDKTHTCPPCPAPELLGGPSVFLFPPKPKDTLMISRTPEVTCVVVDVSHEDPEVKFNWYVDGVEVHNAKTKPREEQYNSTYRVVSVLTVLHQDWLNGKEYKCKVSNKALPAPIEKTISKAKGQPREPQVYTLPPSREEMTKNQVSLTCLVKGFYPSDIAVEWESNGQPENNYKTTPPVLDSDGSFFLYSKLTVDKSRWQQGNVFSCSVMHEALHNHYTQKSLSLSP

SEQ ID NO: 545 - protein, 484 aa, Artificial Sequence
  Synthetic peptide
DKTHTCPPCPAPELLGGPSVFLFPPKPKDTLMISRTPEVTCVVVDVSHEDPEVKFNWYVDGVEVHNAKTKPREEQYGSTYRVVSVLTVLHQDWLNGKEYKCKVSNKALPAPIEKTISKAKGQPREPQVYTLPPSREEMTKNQVSLTCLVKGFYPSDIAVEWESNGQPENNYKTTPPVLDSDGSFFLYSKLTVDKSRWQQGNVFSCSVMHEALHNHYTQKSLSLSPGKGGGGSGGGGSGGGGSGGGGSGGGGSGGGGSDKTHTCPPCPAPELLGGPSVFLFPPKPKDTLMISRTPEVTCVVVDVSHEDPEVKFNWYVDGVEVHNAKTKPREEQYGSTYRVVSVLTVLHQDWLNGKEYKCKVSNKALPAPIEKTISKAKGQPREPQVYTLPPSREEMTKNQVSLTCLVKGFYPSDIAVEWESNGQPENNYKTTPPVLDSDGSFFLYSKLTVDKSRWQQGNVFSCSVMHEALHNHYTQKSLSLSPGK

SEQ ID NO: 546 - protein, 480 aa, Artificial Sequence
  Synthetic peptide
DKTHTCPPCPAPELLGGPSVFLFPPKPKDTLMISRTPEVTCVVVDVSHEDPEVKFNWYVDGVEVHNAKTKPREEQYGSTYRVVSVLTVLHQDWLNGKEYKCKVSNKALPAPIEKTISKAKGQPREPQVYTLPPSREEMTKNQVSLTCLVKGFYPSDIAVEWESNGQPENNYKTTPPVLDSDGSFFLYSKLTVDKSRWQQGNVFSCSVMHEALHNHYTQKSLSLSPGGGGSGGGGSGGGGSGGGGSGGGGSGGGGSDKTHTCPPCPAPELLGGPSVFLFPPKPKDTLMISRTPEVTCVVVDVSHEDPEVKFNWYVDGVEVHNAKTKPREEQYGSTYRVVSVLTVLHQDWLNGKEYKCKVSNKALPAPIEKTISKAKGQPREPQVYTLPPSREEMTKNQVSLTCLVKGFYPSDIAVEWESNGQPENNYKTTPPVLDSDGSFFLYSKLTVDKSRWQQGNVFSCSVMHEALHNHYTQKSLSLSP

SEQ ID NO: 547 - protein, 484 aa, Artificial Sequence
  Synthetic peptide
DKTHTCPPCPAPELLGGPSVFLFPPKPKDTLMISRTPEVTCVVVDVSHEDPEVKFNWYVDGVEVHNAKTKPCEEQYNSTYRCVSVLTVLHQDWLNGKEYKCKVSNKALPAPIEKTISKAKGQPREPQVYTLPPSREEMTKNQVSLTCLVKGFYPSDIAVEWESNGQPENNYKTTPPVLDSDGSFFLYSKLTVDKSRWQQGNVFSCSVMHEALHNHYTQKSLSLSPGKGGGGSGGGGSGGGGSGGGGSGGGGSGGGGSDKTHTCPPCPAPELLGGPSVFLFPPKPKDTLMISRTPEVTCVVVDVSHEDPEVKFNWYVDGVEVHNAKTKPCEEQYNSTYRCVSVLTVLHQDWLNGKEYKCKVSNKALPAPIEKTISKAKGQPREPQVYTLPPSREEMTKNQVSLTCLVKGFYPSDIAVEWESNGQPENNYKTTPPVLDSDGSFFLYSKLTVDKSRWQQGNVFSCSVMHEALHNHYTQKSLSLSPGK

SEQ ID NO: 548 - protein, 480 aa, Artificial Sequence
  Synthetic peptide
DKTHTCPPCPAPELLGGPSVFLFPPKPKDTLMISRTPEVTCVVVDVSHEDPEVKFNWYVDGVEVHNAKTKPCEEQYNSTYRCVSVLTVLHQDWLNGKEYKCKVSNKALPAPIEKTISKAKGQPREPQVYTLPPSREEMTKNQVSLTCLVKGFYPSDIAVEWESNGQPENNYKTTPPVLDSDGSFFLYSKLTVDKSRWQQGNVFSCSVMHEALHNHYTQKSLSLSPGGGGSGGGGSGGGGSGGGGSGGGGSGGGGSDKTHTCPPCPAPELLGGPSVFLFPPKPKDTLMISRTPEVTCVVVDVSHEDPEVKFNWYVDGVEVHNAKTKPCEEQYNSTYRCVSVLTVLHQDWLNGKEYKCKVSNKALPAPIEKTISKAKGQPREPQVYTLPPSREEMTKNQVSLTCLVKGFYPSDIAVEWESNGQPENNYKTTPPVLDSDGSFFLYSKLTVDKSRWQQGNVFSCSVMHEALHNHYTQKSLSLSP

SEQ ID NO: 549 - protein, 20 aa, Artificial Sequence
  Synthetic peptide
GGGGSGGGGSGGGGSGGGGS

SEQ ID NO: 550 - protein, 25 aa, Artificial Sequence
  Synthetic peptide
GGGGSGGGGSGGGGSGGGGSGGGGS

SEQ ID NO: 551 - protein, 30 aa, Artificial Sequence
  Synthetic peptide
GGGGSGGGGSGGGGSGGGGSGGGGSGGGGS

SEQ ID NO: 552 - protein, 35 aa, Artificial Sequence
  Synthetic peptide
GGGGSGGGGSGGGGSGGGGSGGGGSGGGGSGGGGS

SEQ ID NO: 553 - protein, 40 aa, Artificial Sequence
  Synthetic peptide
GGGGSGGGGSGGGGSGGGGSGGGGSGGGGSGGGGSGGGGS

SEQ ID NO: 554 - protein, 503 aa, Artificial Sequence
  Synthetic peptide
QVQLQESGPGLVKPSETLSLTCTVSGDSISSYYWTWIRQPPGKGLEWIGYIYYSGTTNYNPSLKSRVTISVDTSKSQFSLKLSSVTAADTAVYYCASIAVRGFFFDYWGQGTLVTVSSGGGGSGGGGSGGGGSEIVLTQSPGTLSLSPGERATLSCRASQSVSSSYLAWYQQKPGQAPRLLIYGASTRATGIPDRFSGSGSGTDFTLTISRLEPEDFAVYYCQQYGTSPLTFGGGTKVEIKRSGGGGSEVQLVESGGGLVQPGGSLKLSCAASGFTFNKYAMNWVRQAPGKGLEWVARIRSKYNNYATYYADSVKDRFTISRDDSKNTAYLQMNNLKTEDTAVYYCVRHGNFGNSYISYWAYWGQGTLVTVSSGGGGSGGGGSGGGGSQTVVTQEPSLTVSPGGTVTLTCGSSTGAVTSGNYPNWVQQKPGQAPRGLIGGTKFLAPGTPARFSGSLLGGKAALTLSGVQPEDEAEYYCVLWYSNRWVFGGGTKLTVLHHHHHH

SEQ ID NO: 555 - protein, 109 aa, Artificial Sequence
  Synthetic Polypeptide
ELVVTQEPSLTVSPGGTVTLTCGSSTGAVTSGYYPNWVQQKPGQAPRGLIGGTKFLAPGTPARFSGSLLGGKAALTLSGVQPEDEAEYYCALWYSNRWVFGGGTKLTVL

SEQ ID NO: 556 - protein, 109 aa, Artificial Sequence; identical to SEQ ID NO: 555
  Synthetic Polypeptide

SEQ ID NO: 557 - protein, 109 aa, Artificial Sequence
  Synthetic Polypeptide
ELVVTQEPSLTVSPGGTVTLTCGSSTGAVTSGNYPNWVQQKPGQAPRGLIGGTKFLAPGTPARFSGSLLGGKAALTLSGVQPEDEAEYYCVLWYSNRWVFGGGTKLTVL

SEQ ID NO: 558 - protein, 125 aa, Artificial Sequence
  Synthetic Polypeptide
EVQLLESGGGLVQPGGSLKLSCAASGFTFNIYAMNWVRQAPGKGLEWVARIRSKYNNYATYYADSVKSRFTISRDDSKNTAYLQMNNLKTEDTAVYYCVRHGNFGNSYVSFFAYWGQGTLVTVSS

SEQ ID NO: 559 - protein, 125 aa, Artificial Sequence
  Synthetic Polypeptide
EVQLLESGGGLVQPGGSLKLSCAASGFTFNKYAMNWVRQAPGKGLEWVARIRSKYNNYATYYADSVKDRFTISRDDSKNTAYLQMNNLKTEDTAVYYCVRHGNFGNSYISYWAYWGQGTLVTVSS

SEQ ID NO: 560 - protein, 125 aa, Artificial Sequence
  Synthetic Polypeptide
EVQLLESGGGLEQPGGSLKLSCAASGFTFNSYAMNWVRQAPGKGLEWVARIRSKYNNYATYYADSVKGRFTISRDDSKNTAYLQMNNLKTEDTAVYYCVRHGNFGNSYLSFWAYWGQGTLVTVSS

SEQ ID NO: 561 - protein, 125 aa, Artificial Sequence
  Synthetic Polypeptide
EVQLLESGGGLVQPGGSLKLSCAASGFTFNRYAMNWVRQAPGKGLEWVARIRSKYNNYATYYADSVKGRFTISRDDSKNTAYLQMNNLKTEDTAVYYCVRHGNFGNSYLSYFAYWGQGTLVTVSS

SEQ ID NO: 562 - protein, 125 aa, Artificial Sequence
  Synthetic Polypeptide
EVQLLESGGGLVQPGGSLKLSCAASGFTFNVYAMNWVRQAPGKGLEWVARIRSKYNNYATYYADSVKKRFTISRDDSKNTAYLQMNNLKTEDTAVYYCVRHGNFGNSYLSWWAYWGQGTLVTVSS

SEQ ID NO: 563 - protein, 125 aa, Artificial Sequence
  Synthetic Polypeptide
EVQLLESGGGLVQPGGSLKLSCAASGFTFNKYAMNWVRQAPGKGLEWVARIRSKYNNYATYYADSVKSRFTISRDDSKNTAYLQMNNLKTEDTAVYYCVRHGNFGNSYTSYYAYWGQGTLVTVSS

SEQ ID NO: 564 - protein, 125 aa, Artificial Sequence
  Synthetic Polypeptide
EVQLLESGGGLVQPGGSLKLSCAASGFTFNGYAMNWVRQAPGKGLEWVARIRSKYNNYATYYADSVKERFTISRDDSKNTAYLQMNNLKTEDTAVYYCVRHRNFGNSYLSWFAYWGQGTLVTVSS

SEQ ID NO: 565 - protein, 125 aa, Artificial Sequence
  Synthetic Polypeptide
EVQLLESGGGLVQPGGSLKLSCAASGFTFNVYAMNWVRQAPGKGLEWVARIRSKYNNYATYYADSVKKRFTISRDDSKNTAYLQMNNLKTEDTAVYYCVRHGNFGNSYISWWAYWGQGTLVTVSS

SEQ ID NO: 566 - protein, 125 aa, Artificial Sequence
  Synthetic Polypeptide
EVQLLESGGGLVQPGGSLKLSCAASGFTFNSYAMNWVRQAPGKGLEWVARIRSKYNNYATYYADSVKGRFTISRDDSKNTAYLQMNNLKTEDTAVYYCVRHGNFGNSYVSWWAYWGQGTLVTVSS

SEQ ID NO: 567 - protein, 249 aa, Artificial Sequence
  Synthetic Polypeptide
EVQLLESGGGLVQPGGSLKLSCAASGFTFNIYAMNWVRQAPGKGLEWVARIRSKYNNYATYYADSVKSRFTISRDDSKNTAYLQMNNLKTEDTAVYYCVRHGNFGNSYVSFFAYWGQGTLVTVSSGGGGSGGGGSGGGGSELVVTQEPSLTVSPGGTVTLTCGSSTGAVTSGYYPNWVQQKPGQAPRGLIGGTKFLAPGTPARFSGSLLGGKAALTLSGVQPEDEAEYYCALWYSNRWVFGGGTKLTVL

SEQ ID NO: 568 - protein, 249 aa, Artificial Sequence
  Synthetic Polypeptide
EVQLLESGGGLVQPGGSLKLSCAASGFTFNKYAMNWVRQAPGKGLEWVARIRSKYNNYATYYADSVKDRFTISRDDSKNTAYLQMNNLKTEDTAVYYCVRHGNFGNSYISYWAYWGQGTLVTVSSGGGGSGGGGSGGGGSELVVTQEPSLTVSPGGTVTLTCGSSTGAVTSGYYPNWVQQKPGQAPRGLIGGTKFLAPGTPARFSGSLLGGKAALTLSGVQPEDEAEYYCALWYSNRWVFGGGTKLTVL

SEQ ID NO: 569 - protein, 249 aa, Artificial Sequence
  Synthetic Polypeptide
EVQLLESGGGLEQPGGSLKLSCAASGFTFNSYAMNWVRQAPGKGLEWVARIRSKYNNYATYYADSVKGRFTISRDDSKNTAYLQMNNLKTEDTAVYYCVRHGNFGNSYLSFWAYWGQGTLVTVSSGGGGSGGGGSGGGGSELVVTQEPSLTVSPGGTVTLTCGSSTGAVTSGYYPNWVQQKPGQAPRGLIGGTKFLAPGTPARFSGSLLGGKAALTLSGVQPEDEAEYYCALWYSNRWVFGGGTKLTVL

SEQ ID NO: 570 - protein, 249 aa, Artificial Sequence
  Synthetic Polypeptide
EVQLLESGGGLVQPGGSLKLSCAASGFTFNRYAMNWVRQAPGKGLEWVARIRSKYNNYATYYADSVKGRFTISRDDSKNTAYLQMNNLKTEDTAVYYCVRHGNFGNSYLSYFAYWGQGTLVTVSSGGGGSGGGGSGGGGSELVVTQEPSLTVSPGGTVTLTCGSSTGAVTSGYYPNWVQQKPGQAPRGLIGGTKFLAPGTPARFSGSLLGGKAALTLSGVQPEDEAEYYCALWYSNRWVFGGGTKLTVL

SEQ ID NO: 571 - protein, 249 aa, Artificial Sequence
  Synthetic Polypeptide
EVQLLESGGGLVQPGGSLKLSCAASGFTFNVYAMNWVRQAPGKGLEWVARIRSKYNNYATYYADSVKKRFTISRDDSKNTAYLQMNNLKTEDTAVYYCVRHGNFGNSYLSWWAYWGQGTLVTVSSGGGGSGGGGSGGGGSELVVTQEPSLTVSPGGTVTLTCRSSTGAVTSGYYPNWVQQKPGQAPRGLIGATDMRPSGTPARFSGSLLGGKAALTLSGVQPEDEAEYYCALWYSNRWVFGGGTKLTVL

SEQ ID NO: 572 - protein, 249 aa, Artificial Sequence
  Synthetic Polypeptide
EVQLLESGGGLVQPGGSLKLSCAASGFTFNKYAMNWVRQAPGKGLEWVARIRSKYNNYATYYADSVKSRFTISRDDSKNTAYLQMNNLKTEDTAVYYCVRHGNFGNSYTSYYAYWGQGTLVTVSSGGGGSGGGGSGGGGSELVVTQEPSLTVSPGGTVTLTCGSSTGAVTSGYYPNWVQQKPGQAPRGLIGGTKFLAPGTPARFSGSLLGGKAALTLSGVQPEDEAEYYCALWYSNRWVFGGGTKLTVL

SEQ ID NO: 573 - protein, 249 aa, Artificial Sequence
  Synthetic Polypeptide
EVQLLESGGGLVQPGGSLKLSCAASGFTFNGYAMNWVRQAPGKGLEWVARIRSKYNNYATYYADSVKERFTISRDDSKNTAYLQMNNLKTEDTAVYYCVRHRNFGNSYLSWFAYWGQGTLVTVSSGGGGSGGGGSGGGGSELVVTQEPSLTVSPGGTVTLTCRSSTGAVTSGYYPNWVQQKPGQAPRGLIGATDMRPSGTPARFSGSLLGGKAALTLSGVQPEDEAEYYCALWYSNRWVFGGGTKLTVL

SEQ ID NO: 574 - protein, 249 aa, Artificial Sequence
  Synthetic Polypeptide
EVQLLESGGGLVQPGGSLKLSCAASGFTFNVYAMNWVRQAPGKGLEWVARIRSKYNNYATYYADSVKKRFTISRDDSKNTAYLQMNNLKTEDTAVYYCVRHGNFGNSYISWWAYWGQGTLVTVSSGGGGSGGGGSGGGGSELVVTQEPSLTVSPGGTVTLTCGSSTGAVTSGYYPNWVQQKPGQAPRGLIGGTKFLAPGTPARFSGSLLGGKAALTLSGVQPEDEAEYYCALWYSNRWVFGGGTKLTVL

SEQ ID NO: 575 - protein, 249 aa, Artificial Sequence
  Synthetic Polypeptide
EVQLLESGGGLVQPGGSLKLSCAASGFTFNSYAMNWVRQAPGKGLEWVARIRSKYNNYATYYADSVKGRFTISRDDSKNTAYLQMNNLKTEDTAVYYCVRHGNFGNSYVSWWAYWGQGTLVTVSSGGGGSGGGGSGGGGSELVVTQEPSLTVSPGGTVTLTCGSSTGAVTSGNYPNWVQQKPGQAPRGLIGGTKFLAPGTPARFSGSLLGGKAALTLSGVQPEDEAEYYCVLWYSNRWVFGGGTKLTVL

SEQ ID NO: 576 - protein, 249 aa, Artificial Sequence
  Synthetic Polypeptide
EVQLLESGGGLVQPGGSLKLSCAASGFTFNKYAMNWVRQAPGKGLEWVARIRSKYNNYATYYADSVKDRFTISRDDSKNTAYLQMNNLKTEDTAVYYCVRHGNFGNSYISYWAYWGQGTLVTVSSGGGGSGGGGSGGGGSELVVTQEPSLTVSPGGTVTLTCGSSTGAVTSGNYPNWVQQKPGQAPRGLIGGTKFLAPGTPARFSGSLLGGKAALTLSGVQPEDEAEYYCVLWYSNRWVFGGGTKLTVL
